United States Patent Application Publication US 2026/0317762 A1 - sequence listing, part 4

SEQ ID NO: 22298 - DNA, 437 bp, synthetic construct
  source 1..437: mol_type = other DNA
ccacctttggattgttgacgcgttgcactcagcacactaacccgtgtgtagcttgggtcgatgagtctggacatacctcactggcgacagtggtccaggctgcgttggcggcctactcatggtgaaagccatgagacgctagacatgaacaaggtgtgaagagtctattgagctactatagagtcctccggcccctgaatgcggctaatcctaaccatggagcaggtgctcacaggccagtgagttgcttgtcgtaatgcgcaagtccgtggcggaaccgactactttgggtgtccgtgtttcactttttacttttatgactgcttatggtgacaatttgatattgttaccatttagcttgtcaaatcaattgcaaaagatcctaaatcttatttatcaacttgcattttgataactttaatttgaaaattttaaca

SEQ ID NO: 22299 - DNA, 437 bp, synthetic construct
  source 1..437: mol_type = other DNA
ccacctttggattgttgacgcgttgcgctcagcacactaacccgtgtgtagcttgggtcgatgagtctggacatacctcactggcgacagtggtccaggctgcgttggcggcctactcatggtgaaagccatgagacgctagacatgaacaaggtgtgaagagtctattgagctactatagagtcctccggcccctgaatgcggctaatcctaaccatggagcaagtgctcacaggccagtgagttgcttgtcgtaatgcgcaagtccgtggcggaaccgactactttgggtgtccgtgtttcactttttacttttatgactgcttatggtgacaatttgatattgttaccatttagcttgtcaaatcaattgcaaaagatcctaaatcttatttatcaacttgcatcttgataactttaatttgaaaattttaaca

SEQ ID NO: 22300 - DNA, 437 bp, synthetic construct
  source 1..437: mol_type = other DNA
tatcacctttggattgttgacgcgttgcgctcagcacactaacccgtgtgtagcttgggtcgatgagtctggacataccccactggcgacagtggtccaggctgcgttggcggcctactcatggtgaaaaccatgagacgctagacatgaacaaggtgtgaagagtctattgagctactatagagtcctccggcccctgaatgcggctaatcctaaccatggagcaagtgctcacagaccagtgagttgcttgtcgtaatgcgcaagtccgtggcggaaccgactactttgggtgtccgtgtttcactttttacctttttgactgcttatggtgacaatttgatattgttaccatttagcttgtcaaatcaattgcaaaagatcctaaatcttatttatcaacttgcatttgataattttaatttgaagatttaata

SEQ ID NO: 22301 - DNA, 436 bp, synthetic construct
  source 1..436: mol_type = other DNA
tcacctttggattgttgacgcgttgcgctcagcacactaacccgtgtgtagcttgggtcgatgagtctggacataccccactggcgacagtggtccaggctgcgttggcggcctactcatggtgaaaaccatgagacgctagacatgaacaaggtgtgaagagtctattgagctactatagagtcctccggcccctgaatgcggctaatcctaaccatggagcaagtgctcacagaccagtgagttgcttgtcgtaatgcgcaagtccgtggcggaaccgactactttgggtgtccgtgtttcactttttacccttatgactgcttatggtgacaatttgatattgttaccatttagcttgtcaaatcaattgcaaaagatcctaaatcttatttatcaacttgcattttgataactttaatttgaagatttaata

SEQ ID NO: 22302 - DNA, 436 bp, synthetic construct
  source 1..436: mol_type = other DNA
tcacctttggattgttgacgcgttgcgctcagcacactaacccgtgtgtagcttgggtcgatgagtctggacacaccccactggcgacagtggtccaggctgcgttggcggcctactcatggtgaaaaccatgagacgctagacatgaacaaggtgtgaagagtctattgagctactatagagtcctccggcccctgaatgcggctaatcctaaccatggagcaagtgctcacagaccagtgagttgcttgtcgtaatgcgcaagtccgtggcggaaccgactactttgggtgtccgtgtttcactttttacccttatgactgcttatggtgacaatttgatattgttaccatttagcttgtcaaaccaattgcaaaagatcctaaatcctatttatcaacttgcatttcaagaactttaatttgaagatttaata

SEQ ID NO: 22303 - DNA, 436 bp, synthetic construct
  source 1..436: mol_type = other DNA
tcacctttggattgttgacgcgttgcgctcagcacactaacccgtgtgtagcttgggtcgatgagtctggacataccccactggcgacagtggtccaggctgcgttggcggcctactcatggtgaaaaccatgagacgctagacatgaacaaggtgtgaagagtctattgagctactatagagtcctccggcccctgaatgcggctaatcctaaccatggagcaagtgctcacagaccagtgagttgcttgtcgtaatgcgcaagtccgtggcggaaccgactactttgggtgaccgtgtttcactttttacccttatgactgcttatggtgacaatttgatattgttaccatttagcttgtcaaatcaattgcaaaagatcctaaatcttatttatcaacttgcattttgataactttaatttgaagatttaata

SEQ ID NO: 22304 - DNA, 436 bp, synthetic construct
  source 1..436: mol_type = other DNA
tcacctttggattgttgacgcgttgcgctcagcacactaacccgtgtgtagcttgggtcgatgagtctggacataccccactggcgacagtggtccaggctgcgttggcggcctactcatggtgaaaaccatgagacgctagacatgaacaaggtgtgaagagtctattgagctactatagagtcctccggcccctgaatgcggctaatcctaaccatggagcaagtgctcacagaccagtgagttgcttgtcgtaatgcgcaagtccgtggcggaaccgactactttgggtgtccgtgtttcactttttacccttatgactgcttatggtgacaatttgatattgttaccatttagcttgtcaaaccaattgcaaaagatcctaaatcttatttatcaacttgcatttcgacaactttaatttgaagatttaata

SEQ ID NO: 22305 - DNA, 328 bp, synthetic construct
  source 1..328: mol_type = other DNA
ccggcccctgaatgcggctaatcctaaccacggagcgtccaccagcaaaccagctggcagggcgtcgtaacgggtaactctgtggcggaaccgactactttgggtgtccgtgtttccttttgatcctatattggctgcttatggtgacaacgataagttgttatcataaagcttttgggttggccacctggaaaaggttatcggtgtttgatattgttcggctttcacgcctaccaataaaacaagctttatatttgttaatttcattttatccatctaaggatattactgaatttcatttacaactcttgcttgcactatcaccaag

SEQ ID NO: 22306 - DNA, 328 bp, synthetic construct; identical to SEQ ID NO: 312
  source 1..328: mol_type = other DNA

SEQ ID NO: 22307 - DNA, 537 bp, synthetic construct
  source 1..537: mol_type = other DNA
tctgtttccccggtgcggttgtatagactgtttccacggttgaaaacaacttatccgttatccgctatagtacttcgagaaacctagtatcatctttggattgttgatgcgttgcgctcagcacactaacccgtgtgtagcttgggtcgatgagtctggacgtaccccactggcgacagtggtccaggctgcgttggcggcctactcatggtgaaaaccatgagacgctaagcatgaacaaggtgtgaagagtctattgagctactatagagtcctccggcccctgaatgcggctaatcttaaccatggagcaagtgctcacaaaccagtgagttgcttgtcgtaatgcgcaagtccgtggcggaaccgactactttgggtgtccgtgtttcactttttacttttatgactgcttatggtgacaattcaatattgttaccatttagcttgtcagatcaatcacgtaaaatcccaaatcttatttagtaatttgtgtttggataacttcatttgaaaatcttaaacttatttgtaaag

SEQ ID NO: 22308 - DNA, 296 bp, synthetic construct
  source 1..296: mol_type = other DNA
tcctccggcccctgaatgcggctaatcctaactgtggagcatgcgcccccactccagagggtagcgtgtcgtaacgggtaactccgcagcggaaccgactactttgggtgtccgtgtttctttttattcttatattggctgcttatggtgacaattgaaaggttgttaccatatagctattggattggccacccagcgacaaacagagcaataatttaccaatttgtgggatttgttccaataagtctgaaagtcttgaagacacttaatctaatattacaactcaatagtgcaaa

SEQ ID NO: 22309 - DNA, 714 bp, synthetic construct
  source 1..714: mol_type = other DNA
agaggcccacgtggcggctagtactccggtattacggtacccttgtacgcctgttttatactcccttccccgtaacttagaagcacaaaaccaagttcaatagaagggggtacaaaccagtaccaccacgaacaagcacttctgtttccccggtgatgttgtatagactgctcgcgcggttgaaagcgacggatccgttatccgcttatgtacttcgagaagcccagtaccaccttggaatcttcgatgcgttgcgctcagcactcaaccccagagtgtagcttaggctgatgagtctggacgtccctcaccggcgacggtggtccaggctgcgttggcggcctacccatggctaacgccatgggacgctagttgtgaacaaggtgtgaagagcctattgagctacataagagtcctccggcccctgaatgcggctaatcccaaccacggggcaggtgatcacaaaccagtgattagcctgtcgtaacgcgcaagctcgtggcggaaccgactactttgggtgtccgtgtttccttttatttttatcatggctgcttatggtgacaatcacagattgttatcataaagcgaattggattggccatccggtgaaagtgagattcattatctatctgtttgttggatttactccattgagtgtgtttactccaagcttaatctcaacagttattctaatcaggcatttgtatcaca

SEQ ID NO: 22310 - DNA, 714 bp, synthetic construct
  source 1..714: mol_type = other DNA
agaggcccacgtggcggctagtactccggtattacggtacccttgtacgcctgttttatactcccttccccgcaacttagaagcacaaaaccaagttcaatagaagggggtacaaaccagtaccaccacgaacaagcacttctgtttccccggtgatgttgtatagactgctcgcgcggttgaaagcgacggatccgttatccgcttatgtacttcgagaagcccagtaccaccttggaatcttcgatgcgttgcgctcagcactcaaccccagagtgtagcttaggctgatgagtctggacgtccctcaccggcgacggtggtccaggctgcgttggcggcctacccatggctaacgccatgggacgctagttgtgaacaaggtgtgaagagcctattgagctacataagagtcctccggcccctgaatgcggctaatcccaaccacggggcaggtgatcacaaaccagtgattggcctgtcgtaacgcgcaagctcgtggcggaaccgactactttgggtgtccgtgtttccttttatttttatcatggctgcttatggtgacaatcacagattgttatcataaagcgaattggattggccatccggtgaaagtgagattcattatctatctgtttgttggatttactccattgagtgtgtttactccaagcttagtctcaacagttattctaatcaggcatttgtatcaca

SEQ ID NO: 22311 - DNA, 714 bp, synthetic construct
  source 1..714: mol_type = other DNA
agaggcccacgtggcggctagtactccggtattacggtacccttgtacgcctgttttatactcccttccccgtaacttagaagcacaaaaccaagttcaatagaagggggtacaaaccagtaccaccacgaacaagcacttctgtttccccggtgatgttgtatagactgctcgcgcggttgaaagcgacggatccgttatccgcttatgtacttcgagaagcccagtaccaccttggaatcttcgatgcgttgcgctcagcactcaaccccagagtgtagcttaggctgatgagtctggacgtccctcaccggcgacggtggtccaggctgcgttggcggcctacccatggctaacgccatgggacgctagttgtgaacaaggtgtgaagagcctattgagctacataagagtcctccggcccctgaatgcggctaatcccaaccacggggcaggtgatcacaaaccagtgattggcctgtcgtaacgcgcaagctcgtggcggaaccgactactttgggtgtccgtgtttccttttatttttatcatggctgcttatggtgacaatcacagattgttatcataaagcgaattggattggccatccggtgaaagtgagattcattatctatctgtttgttggatttactccattgagtgtgtttactccacgcttaatctcaacagttattctaatcaggcatttgtatcaca

SEQ ID NO: 22312 - DNA, 714 bp, synthetic construct
  source 1..714: mol_type = other DNA
agaggcccacgtggcggctagtactccggtattacggtacccttgtacgcctgttttatactcccttccccgtaacttagaagcacaaaaccaagttcaatagaagggggtacaaaccagtaccaccacgaacaagcacttctgtttccccggtgatgttgtatagactgctcgcgcggttgaaagcgacggatccgttatccgcttatgtacttcgagaagcccagtaccaccttggaatcttcgatgcgttgcgctcagcactcaaccccagagtgtagcttaggctgatgagtctggacgtccctcaccggcgacggtggtccaggctgcgttggcggcctacccatggctaacgccatgggacgctagttgtgaacaaggtgtgaagagcctattgagctacataagagtcctccggcccctgaatgcggctaatcccaaccacggggcaggtgatcacaaaccagtgattggcctgtcgtaacgcgcaagctcgtggcggaaccgactactttgggtgtccgtgtttccttttatttttatcatggctgcttatggtgacaatcacagattgttatcataaagcgaattggattggccatccggtgaaagtgagattcattatctatctgtttgttggatttactccattgagtgtgtttactccaagcttaatctcaacagttattctaatcaggcatttgtatcaca

SEQ ID NO: 22313 - DNA, 714 bp, synthetic construct
  source 1..714: mol_type = other DNA
agaggcccacgtggcggctagtactccggtattacggtacccttgtacgcctgttttatactcccttccccgtaacttagaagcacaaaaccaagttcaatagaagggggtacaaaccagtaccaccacgaacaagcacttctgtttccccggtgatgttgtatagactgctcgcgcggttgaaagcgacggatccgttatccgcttatgtacttcgagaagcccagtaccaccttggaatcttcgatgcgttgcgctcagcactcaaccccagagtgtagcttaggctgatgagtctggacgtccctcaccggcgacggtggtccaggctgcgttggcggcctacccatggctaacgccatgggacgctagttgtgaacaaggtgtgaagagcctattgagctacataagagtcctccggcccctgaatgcggctaatcccaaccacggggcaggtgatcacaaaccagtgattggcctgtcgtaacgcgtaagctcgtggcggaaccgactactttgggtgtccgtgtttccttttatttttatcatggctgcttatggtgacaatcacagattgttatcataaagcgaattggattggccatccggtgaaagtgagattcattatctatctgtttgttggatttactccattgagtgtgtttactccaagcttaatctcaacagttattctaatcaggcatttgtatcaca

SEQ ID NO: 22314 - DNA, 714 bp, synthetic construct
  source 1..714: mol_type = other DNA
agaggcccacgtggcggctagtactccggtattacggtacccttgtacgcctgttttatactcccttccccgtaacttagaagcacaaaaccaagttcaatagaagggggtacaaaccagtaccaccacgaacaagcacttctgtttccccggtgatgttgtatagactgctcgcgcggttgaaagcgacggatccgttatccgcttatgtacttcgagaagcccagtaccaccttggaatcttcgatgcgttgcgctcagcactcaaccccagagtgtagcttaggctgatgagtctggacgtccctcaccggcgacggtggtccaggctgcgttggcggcctacccatggctaacgccatgggacgctagttgtgaacaaggtgtgaagagcctattgagctacataagagtcctccggcccctgaatgcggccaatcccaaccacggggcaggtgatcacaaaccagtgattggcctgtcgtaacgcgcaagctcgtggcggaaccgactactttgggtgtccgtgtttccttttatttttatcatggctgcttatggtgacaatcacagattgttatcataaagcgaattggattggccatccggtgaaagtgagattcattatctatctgtttgttggatttactccattgagtgtgtttactccaagcttaatctcaacagttattctaatcaggcatttgtatcaca

SEQ ID NO: 22315 - DNA, 713 bp, synthetic construct
  source 1..713: mol_type = other DNA
agaggcccacgtggcggctagtactccggtattgcggtacccttgtacgcctgttttatactcccttcccgtaacttagacgcacaaaaccaagttcaatagaagggggtacaaaccagtaccaccacgaacaagcacttctgtttccccggtgatgttgcatagactgctcgcgtggttgaaagtgacggatccgttatccgcttatgtacttcgagaagcccagtatcaccttggaatcttcgatgcgttgcgctcagcactcgaccccggagtgtagcttaggctgatgagtctggacattcctcaccggcgacggtggtccaggctgcgttggcggcctacctatggctaacgccataggacgctagttgtgaacaaggtgtgaagagcctattgagctacataagagtcctccggcccctgaatgcggctaatcctaacctcggggcaggtgatcacaaaccagtgattggcctgtcgtaacgcgcaagcccgtggcggaaccgactactttgggtgtccgtgtttccttttatttttattgtggctgcttatggtgacaatcacagattgttatcataaagcgaattggattggccatccggtgaaagtgagatacattatctatctgtttgttggattcgctccattgagtgtgtttactccaagtacaatttcaatagttattttaatcagacaattgtatcata

SEQ ID NO: 22316 - DNA, 713 bp, synthetic construct
  source 1..713: mol_type = other DNA
agaggcccacgtggcggctagtactccggtattgcggtacccttgtacgcctgttttatactcccttcccgtaacttagacgcacaaaaccaagttcaatagaagggggtacaaaccagtaccaccacgaacaagcacttctgtttccccggtgatgttgcatagactgctcgcgtggttgaaagcgacggatccgttatccgcttatgtacttcgagaagcccagtatcaccttggaatcttcgatgcgttgcgctcagcactcgaccccggagtgtagcttaggctgatgagtctggacatccctcaccggcgacggtggtccaggctgcgttggcggcctacctatggctaacgccataggacgctagttgtgaacaaggtgtgaagagcctattgagctacataagagtcctccggcccctgaatgcggctaatcccaacctcggggcaggtgatcacaaaccagtgattggcctgtcgtaacgcgcaagcccgtggcggaaccgactactttgggtgtccgtgtttccttttatttttattgtggctgcttatggtgacaatcacagattgttatcataaagcgaattggattggccatccggtgaaagtgagatacattatctatctgtttgttggattcgctccattgagtgtgtttactccaagtacaatttcaatagttattttaatcagacaattgtatcata

SEQ ID NO: 22317 - DNA, 712 bp, synthetic construct
  source 1..712: mol_type = other DNA
agaggcccacgtggcggctagtactccggtattgcggtacccttgtacgcctgttttatactcccttcccgtaacttagacgcacaaaaccaagttcaatagaagggggtacaaaccagtaccaccacgaacaagcacttctgtttccccggtgatgttgtatagactgctcgcgtggttgaaagcgacggatccgttatccgcttatgtacttcgagaagcccagtaccacctcggaatcttcgatgcgttgcgctcagcactcaaccccagagtgtagcttaggctgatgagtctggacatccctcaccggcgacggtggtccaggctgcgttggcggcctacccatggctgacgccatgggacgctagttgtgaacaaggtgtgaagagcctattgagctacataagaatcctccggcccctgaatgcggctaatcccaacctcggggcaggtgatcacaaaccagtgattggcctgtcgtaacgcgcaagcccgtggcggaaccgactactttgggtgtccgtgtttccttttattttattgtggctgcttatggtgacaatcacagattgttatcataaagcgaattggattggccatccggtgaaagtgagattcattatctatctgtttgttggatttgctccattgagtgtgtttactccaagtataatttcaacagttattttaatcaggcaattgtatcaca

SEQ ID NO: 22318 - DNA, 697 bp, synthetic construct
  source 1..697: mol_type = other DNA
ttaaaacagccttggggttgttcccactccaagggcccacgtggcggctagtactctggtacttcggtacctttgtacgcctgttttatctcccttcccaatgtaatttagaagcttttaaatcaaggctcaataggtggggcgcaaaccagcgctctcatgagcaagcactcctgtctccccggtgtggttgtataaactgttcccacggttgaaaacaacctatccgttatccgctatagtacttcgagaaacctagtatcacctttggattgttgacgcgttgcgctcagcacactaacccgtgtgtagcttgggtcgatgagtctggacataccccactggcgacagtggtccaggctgcgttggcggcctactcatggtgaaaaccatgagacgctagacatgaacaaggtgtgaagagtctattgagctactatagagtcctccggcccctgaatgcggctaatcctaaccatggagcaagtgctcacaggccagtgagttgcttgtcgtaatgcgcaagtccgtggcggaaccgactactttgggtgtccgtgtttcactttttacttttatgactgcttatggtgacaatttgatattgttaccatttagctgtcaaattaattgcaaaaggtcctaagtcttacctaccaatttgcattttgataaccttgatttgaaaattttaata

SEQ ID NO: 22319 - DNA, 686 bp, synthetic construct
  source 1..686: mol_type = other DNA
ttggggttgttcccactccaagggcccacgtggcggctagtactctggtacttcggtacctttgtacgcctgttttatctcccttcccaatgtaatttagaagcttttaaatcaaggctcaataggtggggcgcaaaccagcgctctcatgagcaagcactcctgtctccccggtgtggttgtataaactgttcccacggttgaaaacaacctatccgttatccgctatagtacttcgagaaacctagtatcacctttggattgttgacgcgttgcgctcagcacactaacccgtgtgtagcttgggtcgatgagtctggacataccccactggcgacagtggtccaggctgcgttggcggcctactcatggtgaaaaccatgagacgctagacatgaacaaggtgtgaagagtctattgagctactatagagtcctccggcccctgaatgcggctaatcctaaccatggagcaagtgctcacaggccagtgagttgcttgtcgtaatgcgcaagtccgtggcggaaccgactactttgggtgtccgtgtttcactttttacttttatgactgcttatggtgacaatttgatattgttaccatttagctgtcaaattaattgcaaaagatcctaagtcttacttaccaatttgcattttgataaccttgatttgaaaactttaata

SEQ ID NO: 22320 - DNA, 689 bp, synthetic construct
  source 1..689: mol_type = other DNA
gccttggggttgttcccactccaagggcccacgtggcggctagtactctggtacttcggtacctttgtacgcctgttttatctcccttcccaatgtaatttagaagcttttaaatcaaggctcaataggtggggcgcaaaccagcgctctcatgagcaagcactcctgtctccccggtgtggttgtataaactgttcccacggttgaaaacaacctatccgttatccgctatagtacttcgagaaacctagtatcacctttggattgttgacgcgttgcgctcagcacactaacccgtgtgtagcttgggtcgatgagtctggacataccccactggcgacagtggtccaggctgcgttggcggcctactcatggtgaaaaccatgagacgctagacatgaacaaggtgtgaagagtctattgagctactatagagtcctccggcccctgaatgcggctaatcctaaccatggagcaagtgctcacaggccagtgagttgcttgtcgtaatgcgcaagtccgtggcggaaccgactactttgggtgtccgtgtttcactttttacttttatgactgcttatggtaacaatttgatattgttaccatttagctgtcaaattaattgcaaaagatcctaagtcttacttaccaatttgcattttgataaccttgatttgaaaattttaata

SEQ ID NO: 22321 - DNA, 684 bp, synthetic construct
  source 1..684: mol_type = other DNA
ccccaagggcccacgtggcggctagtactctggtatttcggtacctttgtacgcctgttttatctccctccccaatgtaacttagaagctttcaaatcaaagctcaataggtggagcgcaagccaacgcttccgtgagcaagtacttctgtttccccggtgcggttgtatagactgttcccacggttaaaaacaacctatccgttatccgctatagtacttcgagaaacctagtatcacctttggattgttgatgcgttgcgctcaacacactaacccgtgtgtagcttgggttgatgagtctggacataccccactggtgacagtggtccaggctgcgttggcggcctactcatggtgaaaaccatgagacgctagacatgaacaaggtgtgaagagtctattgagctactatagagtcctccggcccctgaatgcggctaatcttaaccatggagcaagtgctcacaaaccagtgagttgcttgtcgtaatgcgcaagtccgtggcggaaccgactactttgggtgtccgtgtttcactttttacttttatgactgcttatggtgacaatttaatattgttaccattcagctagtcgaaataatcgcataaaactttaaatcctatctaacagttcacatttggatagttttattttaaggactttaaacctacctagaaag

SEQ ID NO: 22322 - DNA, 438 bp, synthetic construct; identical to SEQ ID NO: 1319
  source 1..438: mol_type = other DNA

SEQ ID NO: 22323 - DNA, 724 bp, synthetic construct; identical to SEQ ID NO: 1320
  source 1..724: mol_type = other DNA

SEQ ID NO: 22324 - DNA, 438 bp, synthetic construct; identical to SEQ ID NO: 1321
  source 1..438: mol_type = other DNA

SEQ ID NO: 22325 - DNA, 438 bp, synthetic construct; identical to SEQ ID NO: 1322
  source 1..438: mol_type = other DNA

SEQ ID NO: 22326 - DNA, 438 bp, synthetic construct; identical to SEQ ID NO: 1323
  source 1..438: mol_type = other DNA

SEQ ID NO: 22327 - DNA, 438 bp, synthetic construct; identical to SEQ ID NO: 1324
  source 1..438: mol_type = other DNA

SEQ ID NO: 22328 - DNA, 438 bp, synthetic construct; identical to SEQ ID NO: 1325
  source 1..438: mol_type = other DNA

SEQ ID NO: 22329 - DNA, 438 bp, synthetic construct; identical to SEQ ID NO: 1326
  source 1..438: mol_type = other DNA

SEQ ID NO: 22330 - DNA, 438 bp, synthetic construct; identical to SEQ ID NO: 1327
  source 1..438: mol_type = other DNA

SEQ ID NO: 22331 - DNA, 438 bp, synthetic construct; identical to SEQ ID NO: 1328
  source 1..438: mol_type = other DNA

SEQ ID NO: 22332 - DNA, 438 bp, synthetic construct; identical to SEQ ID NO: 1329
  source 1..438: mol_type = other DNA

SEQ ID NO: 22333 - DNA, 438 bp, synthetic construct; identical to SEQ ID NO: 1331
  source 1..438: mol_type = other DNA

SEQ ID NO: 22334 - DNA, 733 bp, synthetic construct; identical to SEQ ID NO: 1333
  source 1..733: mol_type = other DNA

SEQ ID NO: 22335 - DNA, 729 bp, synthetic construct; identical to SEQ ID NO: 1334
  source 1..729: mol_type = other DNA

SEQ ID NO: 22336 - DNA, 729 bp, synthetic construct; identical to SEQ ID NO: 1335
  source 1..729: mol_type = other DNA

SEQ ID NO: 22337 - DNA, 579 bp, synthetic construct; identical to SEQ ID NO: 1352
  source 1..579: mol_type = other DNA

SEQ ID NO: 22338 - DNA, 555 bp, synthetic construct; identical to SEQ ID NO: 1374
  source 1..555: mol_type = other DNA

SEQ ID NO: 22339 - DNA, 555 bp, synthetic construct; identical to SEQ ID NO: 1375
  source 1..555: mol_type = other DNA

SEQ ID NO: 22340 - DNA, 556 bp, synthetic construct; identical to SEQ ID NO: 1376
  source 1..556: mol_type = other DNA

SEQ ID NO: 22341 - DNA, 556 bp, synthetic construct; identical to SEQ ID NO: 1377
  source 1..556: mol_type = other DNA

SEQ ID NO: 22342 - DNA, 555 bp, synthetic construct; identical to SEQ ID NO: 1378
  source 1..555: mol_type = other DNA

SEQ ID NO: 22343 - DNA, 555 bp, synthetic construct; identical to SEQ ID NO: 1379
  source 1..555: mol_type = other DNA

SEQ ID NO: 22344 - DNA, 555 bp, synthetic construct; identical to SEQ ID NO: 1380
  source 1..555: mol_type = other DNA

SEQ ID NO: 22345 - DNA, 555 bp, synthetic construct; identical to SEQ ID NO: 1381
  source 1..555: mol_type = other DNA

SEQ ID NO: 22346 - DNA, 555 bp, synthetic construct; identical to SEQ ID NO: 1382
  source 1..555: mol_type = other DNA

SEQ ID NO: 22347 - DNA, 555 bp, synthetic construct; identical to SEQ ID NO: 1383
  source 1..555: mol_type = other DNA

SEQ ID NO: 22348 - DNA, 555 bp, synthetic construct; identical to SEQ ID NO: 1384
  source 1..555: mol_type = other DNA

SEQ ID NO: 22349 - DNA, 555 bp, synthetic construct; identical to SEQ ID NO: 1385
  source 1..555: mol_type = other DNA

SEQ ID NO: 22350 - DNA, 555 bp, synthetic construct; identical to SEQ ID NO: 1386
  source 1..555: mol_type = other DNA

SEQ ID NO: 22351 - DNA, 555 bp, synthetic construct; identical to SEQ ID NO: 1387
  source 1..555: mol_type = other DNA

SEQ ID NO: 22352 - DNA, 555 bp, synthetic construct; identical to SEQ ID NO: 1388
  source 1..555: mol_type = other DNA

SEQ ID NO: 22353 - DNA, 555 bp, synthetic construct; identical to SEQ ID NO: 1389
  source 1..555: mol_type = other DNA

SEQ ID NO: 22354 - DNA, 558 bp, synthetic construct; identical to SEQ ID NO: 1390
  source 1..558: mol_type = other DNA

SEQ ID NO: 22355 - DNA, 555 bp, synthetic construct; identical to SEQ ID NO: 1391
  source 1..555: mol_type = other DNA

SEQ ID NO: 22356 - DNA, 555 bp, synthetic construct; identical to SEQ ID NO: 1392
  source 1..555: mol_type = other DNA

SEQ ID NO: 22357 - DNA, 555 bp, synthetic construct; identical to SEQ ID NO: 1393
  source 1..555: mol_type = other DNA

SEQ ID NO: 22358 - DNA, 555 bp, synthetic construct; identical to SEQ ID NO: 1394
  source 1..555: mol_type = other DNA

SEQ ID NO: 22359 - DNA, 555 bp, synthetic construct; identical to SEQ ID NO: 1395
  source 1..555: mol_type = other DNA

SEQ ID NO: 22360 - DNA, 555 bp, synthetic construct; identical to SEQ ID NO: 1396
  source 1..555: mol_type = other DNA

SEQ ID NO: 22361 - DNA, 556 bp, synthetic construct; identical to SEQ ID NO: 1397
  source 1..556: mol_type = other DNA

SEQ ID NO: 22362 - DNA, 555 bp, synthetic construct; identical to SEQ ID NO: 1398
  source 1..555: mol_type = other DNA

SEQ ID NO: 22363 - DNA, 555 bp, synthetic construct; identical to SEQ ID NO: 1399
  source 1..555: mol_type = other DNA

SEQ ID NO: 22364 - DNA, 555 bp, synthetic construct; identical to SEQ ID NO: 1400
  source 1..555: mol_type = other DNA

SEQ ID NO: 22365 - DNA, 555 bp, synthetic construct; identical to SEQ ID NO: 1401
  source 1..555: mol_type = other DNA

SEQ ID NO: 22366 - DNA, 556 bp, synthetic construct; identical to SEQ ID NO: 1403
  source 1..556: mol_type = other DNA

SEQ ID NO: 22367 - DNA, 556 bp, synthetic construct; identical to SEQ ID NO: 1404
  source 1..556: mol_type = other DNA

SEQ ID NO: 22368 - DNA, 555 bp, synthetic construct; identical to SEQ ID NO: 1405
  source 1..555: mol_type = other DNA

SEQ ID NO: 22369 - DNA, 556 bp, synthetic construct; identical to SEQ ID NO: 1407
  source 1..556: mol_type = other DNA

SEQ ID NO: 22370 - DNA, 554 bp, synthetic construct; identical to SEQ ID NO: 1408
  source 1..554: mol_type = other DNA

SEQ ID NO: 22371 - DNA, 556 bp, synthetic construct; identical to SEQ ID NO: 1409
  source 1..556: mol_type = other DNA

SEQ ID NO: 22372 - DNA, 557 bp, synthetic construct; identical to SEQ ID NO: 1410
  source 1..557: mol_type = other DNA

SEQ ID NO: 22373 - DNA, 556 bp, synthetic construct; identical to SEQ ID NO: 1411
  source 1..556: mol_type = other DNA

SEQ ID NO: 22374 - DNA, 556 bp, synthetic construct; identical to SEQ ID NO: 1412
  source 1..556: mol_type = other DNA

SEQ ID NO: 22375 - DNA, 556 bp, synthetic construct; identical to SEQ ID NO: 1413
  source 1..556: mol_type = other DNA

SEQ ID NO: 22376 - DNA, 556 bp, synthetic construct; identical to SEQ ID NO: 1414
  source 1..556: mol_type = other DNA

SEQ ID NO: 22377 - DNA, 558 bp, synthetic construct; identical to SEQ ID NO: 1415
  source 1..558: mol_type = other DNA

SEQ ID NO: 22378 - DNA, 555 bp, synthetic construct; identical to SEQ ID NO: 1416
  source 1..555: mol_type = other DNA

SEQ ID NO: 22379 - DNA, 557 bp, synthetic construct; identical to SEQ ID NO: 1417
  source 1..557: mol_type = other DNA

SEQ ID NO: 22380 - DNA, 555 bp, synthetic construct; identical to SEQ ID NO: 1418
  source 1..555: mol_type = other DNA

SEQ ID NO: 22381 - DNA, 555 bp, synthetic construct; identical to SEQ ID NO: 1420
  source 1..555: mol_type = other DNA

SEQ ID NO: 22382 - DNA, 557 bp, synthetic construct; identical to SEQ ID NO: 1421
  source 1..557: mol_type = other DNA

SEQ ID NO: 22383 - DNA, 557 bp, synthetic construct; identical to SEQ ID NO: 1422
  source 1..557: mol_type = other DNA

SEQ ID NO: 22384 - DNA, 557 bp, synthetic construct; identical to SEQ ID NO: 1424
  source 1..557: mol_type = other DNA

SEQ ID NO: 22385 - DNA, 557 bp, synthetic construct; identical to SEQ ID NO: 1425
  source 1..557: mol_type = other DNA

SEQ ID NO: 22386 - DNA, 559 bp, synthetic construct; identical to SEQ ID NO: 1426
  source 1..559: mol_type = other DNA

SEQ ID NO: 22387 - DNA, 556 bp, synthetic construct; identical to SEQ ID NO: 1427
  source 1..556: mol_type = other DNA

SEQ ID NO: 22388 - DNA, 556 bp, synthetic construct; identical to SEQ ID NO: 1428
  source 1..556: mol_type = other DNA

SEQ ID NO: 22389 - DNA, 556 bp, synthetic construct; identical to SEQ ID NO: 1429
  source 1..556: mol_type = other DNA

SEQ ID NO: 22390 - DNA, 557 bp, synthetic construct; identical to SEQ ID NO: 1430
  source 1..557: mol_type = other DNA

SEQ ID NO: 22391 - DNA, 776 bp, synthetic construct; identical to SEQ ID NO: 1431
  source 1..776: mol_type = other DNA

SEQ ID NO: 22392 - DNA, 556 bp, synthetic construct; identical to SEQ ID NO: 1433
  source 1..556: mol_type = other DNA

SEQ ID NO: 22393 - DNA, 174 bp, synthetic construct
  source 1..174: mol_type = other DNA
aatttaaatatgttaataatgctgaagacaagtatttcgattattaacctctatatttctatataaagtatctgtgagtctcagtggacatcacagtaaggtcgcagttaacttgtaatcttttcattcctgtgtcggagcagtggtaatggagccggacgatttcgccaaaac

SEQ ID NO: 22394 - DNA, 174 bp, synthetic construct
  source 1..174: mol_type = other DNA
ttgcctctctcaacaaaaagccaccgacattaagagagagagtattgctgcttagttaactgcaggccctatttagggttaccgcccaggatctgcaacagcattcctgtatcatccagggcaccggtggacttggtgaggattgagttgacctcatcattagagaccagactc

SEQ ID NO: 22395 - DNA, 190 bp, synthetic construct
  source 1..190: mol_type = other DNA
ccaacaatgtgatcttgcttgcggaggcaaaatttgcacagtataaaatctgcaagtagtgctattgttggaatcaccgtacctatttaggtttacgctccaagatcggtggatagcagccctatcaatatctaggagaactgtgctatgtttagaagattaggtagtctctaaacagaacaatttacct

SEQ ID NO: 22396 - DNA, 174 bp, synthetic construct
  source 1..174: mol_type = other DNA
ctgatctcttgttagatctttttgtaatctaaactttataaaaacatccactccctgtaatctatgcttgtgggcgtagatttttcatagtggtgtttatattcatttctgctgttaacagctttcagccagggacgtgttgtatcctaggcagtggcccgcccataggtcaca

SEQ ID NO: 22397 - DNA, 174 bp, synthetic construct
  source 1..174: mol_type = other DNA
ggttttgttgtcgttttggaatgtcccatgtcggagatgtcgttaccggtgtttgctttacttgtgcacgaataagaaaacagagtttggagttttggaagttaatggataacatcaagtttccattgcgttcctcgtgcattttaggccagaaaatcgaccacaaaatcgaga

SEQ ID NO: 22398 - DNA, 212 bp, synthetic construct
  source 1..212: mol_type = other DNA
tagcaccacccgatcgtaaactccatgtattggttacccatctgcatcgaaaactctccgaacactaggtgcagtaaggctttcatggagtggtttgctatttagcgtacgtgtaccataggcagccccaaaaacacgtgtgaggagaaagtcccagtcactttgggcaaagtagacagccgcgcttgcgtggtgggacttaattaatgcct

SEQ ID NO: 22399 - DNA, 590 bp, synthetic construct
  source 1..590: mol_type = other DNA
taattcctgcaggttcagggttcttaaatctgtttctctataagaacactcatttttcacgctttctgtcttctttcttccagggctctccccttgccctaggctctggccgttgcgcccggcggggtcaactccatgattagcatggagctgtaggagtctaaattggggacacagatgtttggaacgtcaccttgcagtgttaacttggctttcatgaatctctttgatcttccacaaggggtaggctacgggtgaaacctcttaggctaatacttctatgaagagatgccttggatagggtaacagcggcggatattggtgagttgttaagacaaaaaccattcaacgccggaggactgactctcatccagtggatgcattgagtggattgactgtcagggctgtctttaggcttaattccagacctctctgtgcttagggcaaacatcatttggccttaaatgggattctgtgagaggggatccctccattgacagctggactgttctttggggccttatgtggtgtttgcctctgaggtactcaggggcatttaggtttttcctcattcttaaataataatgaac

SEQ ID NO: 22400 - DNA, 232 bp, synthetic construct
  source 1..232: mol_type = other DNA
gcctccaggaccccccctcccgggagagccatagtggtctgcggaaccggtgagtacaccggaattgccaggacgaccgggtcctttcttggataaacccgctcaatgcctggagatttgggcgtgcccccgcaagactgctagccgagtagtgttgggtcgcgaaaggccttgtggtactgcctgatagggtgcttgcgagtgccccgggaggtctcgtagaccgtgcacc

SEQ ID NO: 22401 - DNA, 174 bp, synthetic construct
  source 1..174: mol_type = other DNA
tagacaatcctgaccgggcaataggactgcattgcatatccttaggtggtattgagaaacctctgccacccaccggcgtggatctctatggggggggccccatagactgggtctatactgcctgatagggtcgcggctggtcgaccactgactgtataaccagttgtactcaac

SEQ ID NO: 22402 - DNA, 174 bp, synthetic construct
  source 1..174: mol_type = other DNA
agttgatcctgccagcggtgggtcgctactgtttcgcgaaccagtcgttttgacagttggttgggatcaaatttgttctgtgcgcgtcacgccactttttgtggcgggaatgtgcgaaaataacaggaaaaagaaccctggaaagggttcaaagaagaaaaagaatgctggaag

SEQ ID NO: 22403 - DNA, 174 bp, synthetic construct
  source 1..174: mol_type = other DNA
cagacaagcaccccacccatcccagaaaccgcacggccgagaatcgatccccagcattcaaaatgcgttattaagaaaaaacatatgatgaagattaaaaccttcatcaacattgcacagactttgatccttaggagtttattctagctatctacaaaacgggtccaaaacgga

SEQ ID NO: 22404 - DNA, 174 bp, synthetic construct
  source 1..174: mol_type = other DNA
taattctaattgctgtccttggctctagcatgatcctagtgagcatcttcattataatcaagaaaacaaagaaaccaacgggagcacctccagagctgagtggtgtcacaaacaatggcttcataccacacagttagttaattaaaaataaaataaaatttgggacaaatcata

SEQ ID NO: 22405 - DNA, 174 bp, synthetic construct
  source 1..174: mol_type = other DNA
ttgtataagtgatttaggatttaccccagaagtgaaataattcttagaataaaagaccgactagaatatccttaaggctgtctaacgtgccacacagctagggttagcctgacatctggaacaagatcgatactaatatagggatttgtttcatactagctctctgcaaacaca

SEQ ID NO: 22406 - DNA, 174 bp, synthetic construct
  source 1..174: mol_type = other DNA
ccgcaggtcacatgtgttaggtttcacagattctatatattactaactctatactcgtaattaacattagataagtagattaagaaaaaagcctgaggaagattaagaaaaactgcttattgggtctttccgtgttttagatgaagcagttgaaattcttcctcttgatattaa

SEQ ID NO: 22407 - DNA, 213 bp, synthetic construct
  source 1..213: mol_type = other DNA
tttgggaatcgcaacacaacatggttacccatagattgaggaaatttccaataaactcagtattaaggcttgttgtgttggacaaggtgccctatttagggtgaggagccttactggcagccccagtgaatcctccattggataggaacagctatattgggtagttgtagcagttgtattcaaatgaatgcagcgttccgaaatatcatacct

SEQ ID NO: 22408 - DNA, 174 bp, synthetic construct
  source 1..174: mol_type = other DNA
ttattcttgaatggctgcttatggtgacaatcatagattgttatcataaagcgagttggattggccatccagtgtgaatcagattaattactcccttgtttgttggatccactcccgaaacgttttactccttaacttattgaaattgtttgaagacaggatttcagtgtcaca

SEQ ID NO: 22409 - DNA, 579 bp, synthetic construct; identical to SEQ ID NO: 15578
  source 1..579: mol_type = other DNA

SEQ ID NO: 22410 - DNA, 174 bp, synthetic construct
  source 1..174: mol_type = other DNA
ggctaaaaaaaatggcgcaatccatagtcgtagatggggactacgacgctcttgctagtagatatcttaaatttgtttatgattttgaaaatgtaacttatcaaaataattacttcgccacagataaatttaaaaaagacatagagcaatatcttaaatcaatccatgatggag

SEQ ID NO: 22411 - DNA, 174 bp, synthetic construct
  source 1..174: mol_type = other DNA
aatgattttgaaacatattaagatgtttatacgagcgtgttgtttactattttcaggatatgtggaagcggttgtgtatgatctatacgcacatttagttcccagagggcgttgtcgtctccccctaagcaagggagaaacacgtggcacatgatcttgcgcttaacgataaaa

SEQ ID NO: 22412 - DNA, 178 bp, synthetic construct
  source 1..178: mol_type = other DNA
tgatcttgctttcgtaataaaattctgtacataaaagtcgaaagtattgctatagttaaggttgcgcttgcctatttaggcatacttctcaggatggcgcgttgcagtccaacaagatccagggactgtacagaattttcctatacctcgagtcgggtttggaatctaaggttgactc

SEQ ID NO: 22413 - DNA, 385 bp, synthetic construct; identical to SEQ ID NO: 17089
  source 1..385: mol_type = other DNA

SEQ ID NO: 22414 - DNA, 174 bp, synthetic construct
  source 1..174: mol_type = other DNA
ggcaaaaaaagcccaacacgcaatgcgtttattgcaattcagttcactggtgcaatgagggtattggggctttttgaacgtgggaataacttgaatttcgcagatacctacgtatatacatggaaccaacagtactcgtatcatgaaaatgcattcctaatttcaaatcaagta

SEQ ID NO: 22415 - DNA, 174 bp, synthetic construct
  source 1..174: mol_type = other DNA
gaaattcccctgtattgtaataagacctcattaacatatttcccctgcttagtactatgcagaaacccccgagcaaattaaaattgatgaagattaagaaaaagagggattttctcaggaaaaatcttttttcttaccttcatctcatttaaacaaatttaggactcaggaaaa

SEQ ID NO: 22416 - DNA, 174 bp, synthetic construct
  source 1..174: mol_type = other DNA
gagaggcaatcttcctcccgtgaaggacacaagcagtagctcacaatcatctcgtgtttcagcaaagtgtgcataattataaagtgctgggtcatctaagcttttcagtcgagaaaaaaacagtagatcagaagaacaactggcaacacttctcatcctgagacctacttcaag

SEQ ID NO: 22417 - DNA, 174 bp, synthetic construct
  source 1..174: mol_type = other DNA
tcagcttacgatctcttgtcagatctcattaaatctaaactttttaaacaagattccctgttatccatgcttgtgagtgtggtttaatcataatcttgtattttactttccacacttttcatctctctgccagtgacgtgttggttgtcctcagcgtccctcccataggtcgca

SEQ ID NO: 22418 - DNA, 174 bp, synthetic construct
  source 1..174: mol_type = other DNA
cttggtttctggagacaggctaaggatgcccttcaggtaccccgaggtaacaagcgacactcgggatctgagaaggggattggggcttctatccaagcgcccaatttaaaaagcttctatgcctgaataggtgaccggaggccggcaccttttcctttacccacaacttacttt

SEQ ID NO: 22419 - DNA, 204 bp, synthetic construct
  source 1..204: mol_type = other DNA
aacgtttctcttctggttaccagcaacataggaaattgtcgttgaactacatgttgtaaggctttagagaaataagggagtgtcctatttaggatgaggtgctccggtggcagccccaccaaaacctctagcgactaggaacagctatatcgggttgctatagcagtcaggatgtcattctggcgttccgaaatacccaaacct

SEQ ID NO: 22420 - DNA, 628 bp, synthetic construct
  source 1..628: mol_type = other DNA
cactgggtgcaagccccagaaaccgacgcctatctaagtagacgcaatgactcggcgccaactcggcgaccggccaaaaggtggtggatgggtgatgacagggttggtaggtcgtaaatcccggtcaccttggtagccactataggtgggtcttaagagaaggttaagattcctcttgtgcctgcggcgagaccgcgcacggtccacaggtgttggccctaccggtgtgaataagggcccgacgtcaggctcgtcgttagaccgagcccgtcacccacctgggcaaacgtcgcccacgtacggtccacgtcgcccttcaatgtctctcttgaccaataggcttagccggccgagttgacaaggaccagtgggggtcgggggcttggggagggaccccaagtcctgcccttcccggtgggccgggaaatgcatggggccacccagctccgcggcggcctgcagccggggtagcccaagaatccttcgggtgagggcgggtggcatttctcttttctataccatcatggcagtccttctgctccttctcgtggtcgaggccggggccattctggccccggccacccacgcttgtcgagcgaatgggcaatacttcctcacaaactgttgc

SEQ ID NO: 22421 - DNA, 174 bp, synthetic construct
  source 1..174: mol_type = other DNA
ttggctcattatttctgttgtttttgttgtattgttgagtcttcttgtgttttgttgtctttctacaggttgttgtggttgttgcaattgtttaacttcatcaatgcgaggctgttgtgattgtggttcaactaaacttccttattacgaatttgaaaaggtccacgttcaata

SEQ ID NO: 22422 - DNA, 642 bp, synthetic construct
  source 1..642: mol_type = other DNA
aactctaagccgaacaattatagctaggctttttattatataacattaattaggcattagcgttgtcgccaatctcttggtaatcctaaggatacctttcctgttgactaagatgaagcgccttcggttaccgatgcccggtgtccacgaagccatcgtggtcggccgcgtcccccacctctcccaacttggactccatgttttcagtaggtgtaatgattagtattattgattctgctcgttcaatgtgtttatcttcacgatctgggacccaacacatgcttcactcatgtttaaatgttggttccctcattttgaagacacccaaaccatagagtgcgagaatgaggatttctacttccattctggtaacagaaatgaattcctgcgtgtgtctcgtaaatggaatctttaagaacttcagataaatcgaacaatacactaatacaagttgttttctaccaacatgttcaatgcggctaatctgaccgtggagctgtgaagcgctcaaacccgagtgttgtatacagtcgtaatgcgtaagtccatgaggaaccgactactgttacctctgttggtgtgtttctcctttattctcttttattattatttgttattgcaaatactacaactttgatcaac

SEQ ID NO: 22423 - DNA, 353 bp, synthetic construct
  source 1..353: mol_type = other DNA
ttcgataccaagagctggtgtctgagggattacgactcgcgtggtcggacagcacatgttagtcatgtattatggtgtttcccaacacgtatctttgctctagtattgaactttagtgatgagtgtacttggcatgtacacctgattagttagcccttgtggatacgccactgccgctcaggtacagtaggacataccccaaatattgggttccactcgtagagaagaaaattagtggcgaaacgtacggtttatgtcaaaggagaaggtgattttaattgcacctgaagcaaccctaggtcttccctttgatgtgagctaataaggagtaaccgattcttacaatgtgatca

SEQ ID NO: 22424 - DNA, 174 bp, synthetic construct
  source 1..174: mol_type = other DNA
tgctgctatacattggctgcttatggtgacaattgacaaattgttaccatatagctattggattggccatccggtgacaaacagagctattgtttacttgtttgttggtttcataccattaaattacaaggtcttagaaactctcaactttattttgacactcaatacagcaaa

SEQ ID NO: 22425 - DNA, 174 bp, synthetic construct
  source 1..174: mol_type = other DNA
ggctataaaatggcttcgctcatttatagacaattgctcacgaattcttatacagtagatttatccgatgagatacaagagattggatcaactaaatcacaaaatgtcacaattaatcctggaccatttgcgcaaacaggttatgctccagttaactggggacctggagaaatt

SEQ ID NO: 22426 - DNA, 174 bp, synthetic construct
  source 1..174: mol_type = other DNA
gtattaaaaattgatagcgcttgcgtaagagtaagatctcaagatggatcctgtatctgtagtacatagcttcgctaggagtcaaggcctgccacttaactttgaaactgtgggttgtgagggtccaagtcacgacccacgctttgtaattgaatgtaaatttcttgatttcca

SEQ ID NO: 22427 - DNA, 395 bp, synthetic construct
  source 1..395: mol_type = other DNA
tcccgcatggcaagggcgtgctaccttgccccttgacgcatggtatgcgtcatcatttgccttggttaagccccatagaaacgaggcgtcacgtgccgaaaatccctttgcgtttcacagaaccatcctaaccatgggtgtagtatgggaatcgtgtatggggatgattaggatctctcgtagagggataggtgtgccattcaaatccagggagtactctggctctgacattgggacatttgatgtaaccggacctggttcagtatccgggttgtcctgtattgttacggtgtatccgtcttggcacactgaaagggtatttttgggtaatcctttcctactgcctgatagggtggcgtgcccggccacgagagattaagggtagcaatttaaac

SEQ ID NO: 22428 - DNA, 174 bp, synthetic construct
  source 1..174: mol_type = other DNA
tgcgtgtctccccgcacttgtggttaaaaccatgaaagttcatcccaaacaatcttttcctcttctttttcttttagtggtgacaacctactggattggtgattaccaatctgtactagtgttgtattaagacttgttgtgtggagaaaatggactctttcaagaagatttttg

SEQ ID NO: 22429 - DNA, 174 bp, synthetic construct
  source 1..174: mol_type = other DNA
cgcacatgtgatcctaggcgattcttgatcgcgcttattagctaaccaatttaatttggtgttgaagtgttgacacgctctctaacacatggggcagcttatcagcttctttcaggagattcctgtttttctacaggaagctctgaacatcgctttagtggctgttagtctcat

SEQ ID NO: 22430 - DNA, 174 bp, synthetic construct
  source 1..174: mol_type = other DNA
gtataaattttgtatccgatagtagcacatagaatcacaatcacatccccgttttttgaaattttataatttctacagcaaattttatatcaaatgcctaggaaaaaggagcaggccagcaagagtgaaaatgaaaagcaaacaagtaacgttcaagctcaagatttcaaaact

SEQ ID NO: 22431 - DNA, 174 bp, synthetic construct
  source 1..174: mol_type = other DNA
ttatgtgagcctgtgtgagctgacaaacttagtagtgtttgtgaggattaacaacaattaacacagtgcgagctgtttcttagcacgaagatctcgatgtctaagaaaccaggagggcccggcaagagccgggctgtcaatatgctaaaacgcggaatgccccgcgtgttgtcc

SEQ ID NO: 22432 - DNA, 445 bp, synthetic construct; identical to SEQ ID NO: 488
  source 1..445: mol_type = other DNA

SEQ ID NO: 22433 - DNA, 174 bp, synthetic construct
  source 1..174: mol_type = other DNA
cttaagcgcctctgtagggaagccaggaatgtccaggaggtaccccttccgctcggaagggatctgacctggagacacatcacatgtgctttacacctgtgcttgtgtttaaaaattgtcgcagcttccccaaaccaagtggtcttggttttctctttttattatattgtcaat

SEQ ID NO: 22434 - DNA, 334 bp, synthetic construct
  source 1..334: mol_type = other DNA
ttcagggcctccctccagcgacggccgaactgggctagccatgcccacagtaggactagcaaacggagggactagccgtagtggcgagctccctgggtggtctaagtcctgagtacaggacagtcgtcagtagttcgacgtgagcagaagcccacctcgagatgctatgtggacgagggcatgcccaagacacaccttaaccctagcgggggtcgctagggtgaaatcacaccacgtgatgggagtacgacctgatagggcgctgcagaggcccactattaggctagtataaaaatctctgctgtacatggcacatggagttgaatcattttga

SEQ ID NO: 22435 - DNA, 174 bp, synthetic construct
  source 1..174: mol_type = other DNA
gtaatcaaggtagattttgtgctacattcactctttatggtaaatccaaacattatgataaatattttggagtaataaatggtttcacagcattcgctaatactgtagaggatgctgttaacaaactggttttcttagctgttgactttattacctggcgcagacaggagttaa

SEQ ID NO: 22436 - DNA, 211 bp, synthetic construct
  source 1..211: mol_type = other DNA
taaaaagcaaaaatgtgatcttgcttgtaaatacaattttgagaggttaataaattacaagtagtgctatttttgtatttaggttagctatttagctttacgttccaggatgcctagtggcagccccacaatatccaggaagccctctctgcggtttttcagattaggtagtcgaaaaacctaagaaatttacctgctacatttcaagata

SEQ ID NO: 22437 - DNA, 174 bp, synthetic construct
  source 1..174: mol_type = other DNA
gtgggtgtggttgtgcatttcagtcgtgctcatctttgtggtgagtatgttgctattatgttgttgttctactggttgctgtggcttctttagttgttttgcatcttctattagaggttgttgtgaatcaactaaacttccttattacgacgttgaaaagatccacatacagta

SEQ ID NO: 22438 - DNA, 174 bp, synthetic construct
  source 1..174: mol_type = other DNA
ttgtagatctctcacgcattttagtgtcatgaattagtgtttcaaatcagttgcatatcaattaagaaaaacttaggagacaggtatagaacctctctttcagataactggtcaattaaggacagaaattctgtttctcaaatccgctagcctttgtcaaagaggacacaagca

SEQ ID NO: 22439 - DNA, 174 bp, synthetic construct
  source 1..174: mol_type = other DNA
ctaataaattaagaaaaacttaggacccaagtcctttaaacgtgcatgattgagatagtcagaaattggagctaatttgaatactagtgagtaaattaggagtagtagtattgaaccacctcatatcttatttcttctgaactgcattaaaatttgtacccaggatataacaac

SEQ ID NO: 22440 - DNA, 174 bp, synthetic construct
  source 1..174: mol_type = other DNA
gctctgacattgggacatttgatgtaaccggacctggttcagtatccgggttgtcctgtattgttacggtgtatccgtcttggcacactgaaagggtatttttgggtaatcctttcctactgcctgatagggtggcgtgcccggccacgagagattaagggtagcaatttaaac

SEQ ID NO: 22441 - DNA, 77 bp, synthetic construct
  source 1..77: mol_type = other DNA
cagagagagtaacgcacaatcactactcaaacgacaacagcaaagcgcaatacatacggatctcaactgggcaataa

SEQ ID NO: 22442 - DNA, 191 bp, synthetic construct
  source 1..191: mol_type = other DNA
gactatgtgatcttattaaaattaggttaaatttcgaggttaaaaatagttttaatattgctatagtcttagaggtcttgtatatttatacttaccacacaagatggaccggagcagccctccaatatctagtgtaccctcgtgctcgctcaaacattaagtggtgttgtgcgaaaagaatctcacttcaa

SEQ ID NO: 22443 - DNA, 174 bp, synthetic construct
  source 1..174: mol_type = other DNA
gcgtaagtctgggacggaaccgactactttgggtgtccgtgtttcctgttttacttactttggctgcttatggtgacaatctagtgttgttaccatatagctattggattggccatccggtgttttgaattgtgtgtttatactaattcttttacatatcacagacaaccaaat

SEQ ID NO: 22444 - DNA, 549 bp, synthetic construct
  source 1..549: mol_type = other DNA
caaaattgcgtgcgagaaagcacgcaaatcaaagtctagtgcgtaattcactcactaccggcgtaatttgtggttatgctattgcgttgagagtgttgtgggcgtagtacgggggcttttggtttgtgtgtgattaatatgcattcccagttttgtttagttttagattactgatttatttttcgaactacccgaatttatttaggctcttcgagaaataatgatgaactgtcctcaacaagtatgaaaagcaattatttgtgaagttacttgttgttgtaagattattgacctcttagatttttctaagttgtaatgctttgttttctgattgactagattatgaatccaattaaaaggagtagtggtctaatatagtctgtgtgacctgcaggcattttgtgaaaagggtaaagtatgaaagctactctcagaaaagtacttatgtattgatgagagccttaaaatgactttatattcacaaaactgctggaagacaatgatctggggtatcacattccctcttaggttaagtttcgcactactagg

SEQ ID NO: 22445 - DNA, 174 bp, synthetic construct
  source 1..174: mol_type = other DNA
cgtgtttcctgttttaacttttatggctgcttatggtgacaatttaacattgttaccatatagctgttgggttggccatccggattttgttataaaaccatttcctcgtgccttgacctttaacacatttgtgaacttctttaaatcccttttattagtccttaaatactaaga

SEQ ID NO: 22446 - DNA, 174 bp, synthetic construct
  source 1..174: mol_type = other DNA
cttgggttgtagatatagtcaatcaactggtctgacaagtcataccccaaacaatccaaatctggaatcacctgttcgctcagtagtaatatcttggcaaacactacactaacctcgtctgtactgtctgaaagtggtcaggattgattgacagttattatttatctttaagca

SEQ ID NO: 22447 - DNA, 174 bp, synthetic construct
  source 1..174: mol_type = other DNA
ggaaatttccaataaactctggtgtaaggcttagagtgatggtcgaggtgccctatttagggtgaggagcctcggtggcagccccaccaaatcctctattggataggaacagctgtactgggcagttacagcagtcgtatggtaacacatgcggcgttccgaaataccatgcct

SEQ ID NO: 22448 - DNA, 518 bp, synthetic construct
  source 1..518: mol_type = other DNA
ctgctagacttcgccacgcttacaccattgagaacacataggtggtgtaatattatgtgtttggctgcgtgtgtcacgagcacgatctatgggggaatctaacccaggtggtgttgtgtatgatgaggtacaagcccgtcaacaccacaggtggagagggacaggagtctcatttcccctccaaaaaacagcagtggtccgcccctcatgccctatgaaacattagggggccgacactagtgggcaagcccgatggtgtgggggactggatatgggaaccccagtccgttaaacccgtacggcttcgccagcctacaccggggggggcttaatccccttattttggcacctgaaaatattacttttgacactttaaacacacacaatgatcacgaggagacccatggagagtctccagaggttcctaaggcctcgatcgcgcctgccgggaggcagaatgtcccggttctccaacaaaatcaagaaaacgaagataatcacgcgctgggcggtagcga

SEQ ID NO: 22449 - DNA, 691 bp, synthetic construct
  source 1..691: mol_type = other DNA
gccccggacctcccaccgaggtggggggaaaggggccctggaccggccgggtggaaggcccggaaccggtccatcttcctcaaggttgaggaaggggtacgtctatcggtccggtcggtccgaaaggcgtctggatgcctagtgttagggttcgtaggtggtaaatcccagctaggcgtgaaagcgctataggataggcttatcccggtgaccgctgccccggaaccagccccgcggktctttggacacggtccacaggttgggggtaccggtgtgaataaccccccgactgaagcgtcagtcgttaaacggagacggtctcctgagatcgcaacgacgccccacgtacgggaacgccgccaaaaccttcgggacagctatgcgggttgacaatcccagtggggggccggggaccagctgattacttgtcctgcgagttcctcttgagactggccgaaaggcagccacggggccaccaaggcggcgcagcgctgcatgcggcaaggggaaaaatccttcgggtgacccctggtggcaatcccttcccttaggagcatgagtgtggtcgacacattcaccatggcttggctgtggttgctggtttgcttccccctcgcggggggggtgctcttcaactcgcggcaccagtgcttcaatggggaccattatgtgctttccaattgttgttccc

SEQ ID NO: 22450 - DNA, 174 bp, synthetic construct
  source 1..174: mol_type = other DNA
tcaactctcaagatccttcctcttcttactttgttccgctcctcgcctagtcccaacacagcaatcaccaaccagatcgaagaaaccgcggcaggtcgacccaactgagcaacatcgactgcaacttcacacaagcctccaactggcctccaacagataccgcaaagaacccaa

SEQ ID NO: 22451 - DNA, 174 bp, synthetic construct
  source 1..174: mol_type = other DNA
ggcagaagcacagcattttcttgtgagcttcgagcactaataaaactgaaaatcaaaatgtccaacatggatattgacagtataaataccggaacaatcgataaaacaccagaagaactgactcccggaaccagtggggcaaccagaccaatcatcaagccagcaacccttgct

SEQ ID NO: 22452 - DNA, 174 bp, synthetic construct
  source 1..174: mol_type = other DNA
acctagtgtatcctcggggctgtaatataatcagccatttaacacataacaagccctactgttttcttgttttgccgtgcatttagaataagagacaacttaaacctccgattcggcaacacagggaataatctcaccagacccggcagtgtcttcaggcttcatagccccaag

SEQ ID NO: 22453 - DNA, 741 bp, synthetic construct; identical to SEQ ID NO: 20453
  source 1..741: mol_type = other DNA

SEQ ID NO: 22454 - DNA, 174 bp, synthetic construct
  source 1..174: mol_type = other DNA
tactattctatattggctgcttatggtgacaattgaaagattgttaccatatagctattggattggccatccggtgtcaaacagagcaatcatttatttgtttgttggttttatacctctgaactttaaagtgctaaagactctcaattttatattatatctcaacaaatcagg

SEQ ID NO: 22455 - DNA, 174 bp, synthetic construct
  source 1..174: mol_type = other DNA
caattcagttttagatttaagtaagtttgaatgtaaacataaagccactgttgttgttacacttaaagatagtgatgtaaatgatatggttttgagtttgattaagagtggtaggttgttgttacgcaataatggtcgttttggtggttttagtaatcatttagtctcaactaa

SEQ ID NO: 22456 - DNA, 174 bp, synthetic construct
  source 1..174: mol_type = other DNA
agaccggggaccggtcactaccaaggacgcagacctctttttgagtatcacgcctccggaagtagttgggcaagcccacctatatgtgttgggatggttggggttagccatccataccgtactgcctgatagggtccttgcgaggggatctgggagtctcgtagaccgtagcac

SEQ ID NO: 22457 - DNA, 174 bp, synthetic construct
  source 1..174: mol_type = other DNA
tgcttccttatacaattttgagaggttaataagaaggaagtagtgctatcttaataattaggttaactatttagttttactgttcaggatgcctattggcagccccataatatccaggacaccctctctgcttcttatatgattaggttgtcatttagaataagaaaataacct

SEQ ID NO: 22458 - DNA, 174 bp, synthetic construct
  source 1..174: mol_type = other DNA
ccatcaagcaagtgttgtagaataccaggggtttcacaggctgctaaacttactaaattttacataggattatataattcttttcgatacacgttatatctttagcaaagtgaggaaaacagctttatcatgttagatgccagttatccattttaagtgaatcctttcctcaac

SEQ ID NO: 22459 - DNA, 237 bp, synthetic construct
  source 1..237: mol_type = other DNA
aaattcaaatagttaagatttaattaggattaattaccgatattgtaatcttctattattttatcggtttgaatctcccttacacatatgattatgtagcgtgcttattagtagtagatacatctaaattctacaacgacctaataagttttgattatataagataggatgtgaaggctccgatttgtgaataggtttttatattcgaagtaggtagtattgcgcatactattaatt

SEQ ID NO: 22460 - DNA, 174 bp, synthetic construct
  source 1..174: mol_type = other DNA
acagtgtgcaatcggttcaccgtaaattatcattgatatctgttatatcctaataagcattcaaaatccaatcctcccctgaataacagcccaatccgcaaagtactttgggtataggtataatccaagttgaattctcaagtagacaactaggcctttgagtatcctgtgatc

SEQ ID NO: 22461 - DNA, 174 bp, synthetic construct
  source 1..174: mol_type = other DNA
catttatttatattaaatactgacactttgcgggttaaaatgtttaatactatttttcaatttgaggttgtatgagataattttgatttctatgttatcattgaataagggagtctggccctaattgatgtacgactcttctttggttgcgacccgagtcccttctacatcaag

SEQ ID NO: 22462 - DNA, 148 bp, synthetic construct
  source 1..148: mol_type = other DNA
gaattcgtcgattcggttgcagcatttaaagcggttgacaactttaaaagaaggaaaaagaaggttgaagaaaagggtgtagtaagtaagtataagtacagaccggagaagtacgccggtcctgattcgtttaatttgaaagaagaaa

SEQ ID NO: 22463 - DNA, 174 bp, synthetic construct
  source 1..174: mol_type = other DNA
ggacggtagtgattggttaagatttggtgtaaggttcatgtgccaacgccctgtgcgggatgaaacctctactgccctaggaatgccaggcaggtaccccacctccgggtgggatctgagcctgggctaattgtctacgggtagtttcatttccaatccttttatgtcggagtc

SEQ ID NO: 22464 - DNA, 419 bp, synthetic construct
  source 1..419: mol_type = other DNA
gtcttcttgacgagcattcctaggggtctttcccctctcgccaaaggaatgcaaggtctgttgaatgtcgtgaaggaagcagttcctctggaagcttcttgaagacaaacaacgtctgtagcgaccctttgcaggcagcggaaccccccacctggcgacaggtgcctctgcggccaaaagccacgtgtataagatacacctgcaaaggcggcacaaccccagtgccacgttgtgagttggatagttgtggaaagagtcaaatggctctcctcaagcgtattcaacaaggggctgaaggatgcccagaaggtaccccattgtatgggatctgatctggggcctcggtgcacatgctttacatgtgtttagtcgaggttaaaaaacgtctaggccccccgaaccacggggacgtggttttc

SEQ ID NO: 22465 - DNA, 174 bp, synthetic construct
  source 1..174: mol_type = other DNA
tccggcccctgaatgtggctaaccttaaccctgcagccgttgcccataatccaatgggtttgcggtcgtaatgcgtaagtgcgggatgggaccaactactttgggtgtccgtgtttcctgtttttcttttgattgcattttatggtgacaatttatagtgtatagattgtcatc

SEQ ID NO: 22466 - DNA, 174 bp, synthetic construct
  source 1..174: mol_type = other DNA
agcaaaagcaggtactgatccaaaatggaagactttgtgcgacaatgcttcaatccaatgattgtcgagcttgcggaaaaggcaatgaaagaatatggggaagatccgaaaatcgaaacgaacaaatttgccgcaatatgcacgcacttagaagtctgtttcatgtattcagat

SEQ ID NO: 22467 - DNA, 717 bp, synthetic construct
  source 1..717: mol_type = other DNA
gagaggagcccgttttcgggcacttgtctcctaaacaatattggcgcgcatttgcgcgcccccccccatttcagccccctgtcattgactggtcgaaggcgttcgcaataagactggtcgtcacttggctgttctatcgtttcaggctttagcgcgccctcgcgcggcgggccgtcaagcccgtgcgctgtatagcgccaggtaaccggacagcggcttgctggattttcccggtgccattgctctggatggtgtcaccaagctgacaaatgcggactgaacctcacaaagcgacacacctgtggtagcgctgcccaaaagggagcggaactcccccgccgcgaggcggtcctctctggccaaaagcccagcgttaatagcgccttttgggatgcaggagccccacctgccaggtgtgaagtggagtgagtggatctccaatttggtctgttctgaactacaccatctactgctgtgaagaatgccctggaggcaagctggttacagccctgaccaggggccctgcccgtgactctcgatcggcgcagggtcaaaaattgtctaagcagcagcaggaacgcgggagcgtttcttttccctttgtatcgacatgatggcggcgtctaaggtgtatagagtttgcgagcagactctgctagcaggcgccgttcgcatgatggacaaatttttgcaaaagagaactgtttttgtccccca

SEQ ID NO: 22468 - DNA, 174 bp, synthetic construct
  source 1..174: mol_type = other DNA
ataatatcctgatgaattctatagaacttaggattaagaaaaaattcatgatgaagattaaaaccttcatcatcctttaaaaagagagctattctttatctgaatgtccttattaatgtctaagagctattattttgtaccctcttagcctagacactgcccagcatataagcc

SEQ ID NO: 22469 - DNA, 655 bp, synthetic construct
  source 1..655: mol_type = other DNA
ccccttcccccgaagtaacttagaagctgtaaatcaacgatcaatagcaggtgtggcacaccagtcataccttgatcaagcacttctgtttccccggactgagtatcaataggctgctcgcgcggctgaaggagaaaacgttcgttacccgaccaactacttcgagaagcttagtaccaccatgaacgaggcagggtgtttcgctcagcacaaccccagtgtagatcaggctgatgagtcactgcaacccccatgggcgaccatggcagtggctgcgttggcggcctgcccatggagaaatccatgggacgctctaattctgacatggtgtgaagagcctattgagctagctggtagtcctccggcccctgaatgcggctaatcctaactgcggagcacatgctcacaaaccagtgggtggtgtgtcgtaacgggcaactctgcagcggaaccgactactttgggtgtccgtgtttccttttattcctatattggctgcttatggtgacaatcaaaaagttgttaccatatagctattggattggccatccggtgtgcaacagggcaattgtttacctatttattggttttgtaccattatcactgaagtctgtgatcactctcaaattcattttgaccctcaacacaatcaaac

SEQ ID NO: 22470 - DNA, 174 bp, synthetic construct
  source 1..174: mol_type = other DNA
caaaattttactttgattgattttgcaaggagttataaaaatcttgaaggataaattgttataaagtagagtcgaagaacattaaatgttctttgttagaattattcatctaagttgtttttgagtatattcgcttcaatacaactcctctttatatttgatttaagttttaaa

SEQ ID NO: 22471 - DNA, 174 bp, synthetic construct
  source 1..174: mol_type = other DNA
gtagggaagccaggaatgtccaggaggtaccccttccgctcggaagggatctgacctggagacacatcacatgtgctttacacctgtgcttgtgtttaaaaattgtcgcagcttccccaaaccaagtggtcttggttttctctttttattatattgtcaatatggcttgcaaac

SEQ ID NO: 22472 - DNA, 174 bp, synthetic construct
  source 1..174: mol_type = other DNA
accaaacaagaggaaaaacttgtttggaatatataataatattaaatagtattttagggttaaagtaatactttaaagggacaagtcacagacatttgatcttagtataaatttttataatggccgggctactaagtacttttgacacatttagttccaggagaagtgagagca

SEQ ID NO: 22473 - DNA, 280 bp, synthetic construct
  source 1..280: mol_type = other DNA
acttggttatgaattcattgtattaacccctctgaaagacctgctctggcgcgagctaaagcgcaattgtcaccaggtattgcaccaatggtggcgacagggtacagaagagcaagtactcctgactgggtaatgggactgcattgcatatccctaggcacctattgagatttctctggggcccaccagcgtggagttcctgtatgggaatgcaggactggacttgtgctgcctgacagggtcgcggctggccgtctgtactttgtatagtcagttgaaa

SEQ ID NO: 22474 - DNA, 510 bp, synthetic construct
  source 1..510: mol_type = other DNA
acttagaagcacaatgtccaagttcaataggagggggtacaaaccagtaccaccacgaacaagcacttctgttcccccggtgaggctgtataggctgtttccacggctaaaagcggctgatccgttatccgctcatgtacttcgagaagcctagtatcaccttggaatcttcgatgcgttgcgctcaacactcaaccccagagtgtagcttaggtcgatgagtctggacgttcctcaccggcgacggtggtccaggctgcgttggcggcctacctgtggcccaaagccacaggacgctagttgtgaacaaggtgtgaagagcctattgagctacctgagagtcctccggcccctgaatgcggctaatcctaaccacggagcaggcagtggcaatccagcgaccagcctgtcgtaacgcgcaagttcgtggcggaaccgactactttgggtgtccgtgtttccttttatttttacaatggctgcttatggtgacaatcattgattgttatc

SEQ ID NO: 22475 - DNA, 697 bp, synthetic construct
  source 1..697: mol_type = other DNA
attgatgtgttggtcgtttgccaatcggagggcgacaggcacaggtcgctccgagttctagtagtgtgggaacttgttactactgatgaaacgaggtagtgacactcagtacctgcgaacgaggtcggggccctcccttcttccttcacccaactttcacttttcgttccactttagcaggggtcttctttctatccccctggcggcattggaactagccgtcgcgtcttaacgcgcagccctgaaggccccacaccttgtggatcttgccgtgggtatgtttctggcatgtgtttctcaagcctgcaaccgaagccgaacagccacatgaacagtttgagcgtggtagcgctgtgtgagttggcggtggatccccctcgtggtaacacgagcccccgtggccaaaagcccagtgtttacagcacctctcacatccaggacgaccccatcctggcgctcactcttagtagtatggcttagtacgcattaggtggtaagccgagctctccctcggccttgttctgaatgcacacatgtctaggggctaaggatgtcctacaggtacccgcacgtaaccttcagagagtgcggatctgagtaggagaccgtggtgcactgctttacagatgcagcccggtttaaaaagcgtctatgcccctacagggtagcggtgggccgcgccctttccttttaaaac

SEQ ID NO: 22476 - DNA, 174 bp, synthetic construct
  source 1..174: mol_type = other DNA
catccgtaatacaacccggaataacctccaaaccgagaagaactagtctatgaccagacgaaaaggaactagtccctgttcttttcttagggcctttttcacctgggtaaagtgtagttattgcgtataactctggtatcaataccacccggaagaaattatttatctgccatc

SEQ ID NO: 22477 - DNA, 408 bp, synthetic construct
  source 1..408: mol_type = other DNA
ccttcatcaagacaccaggtctttcctccttaaggctagccccggcgtgtgaattcacgttgggcaactagtggtgtcactgtgcgctcccaatctcggccgcggagtgctgttccccaagccaaacccctggcccttcactatgtgcctggcaagcatatctgagaaggtgttccgctgtggctgccaacctggtgacaggtgccccagtgtgcgtaaccttcttccgtctccggacggtagtgattggttaagatttggtgtaaggttcatgtgccaacgccctgtgcgggatgaaacctctactgccctaggaatgccaggcaggtaccccacctccgggtgggatctgagcctgggctaattgtctacgggtagtttcatttccaatccttttatgtcggagtc

SEQ ID NO: 22478 - DNA, 174 bp, synthetic construct
  source 1..174: mol_type = other DNA
gaggagttcaggtagatattgaaagatgagccttctaaccgaggtcgaaacgtatgttctctctatcgttccatcaggccccctcaaagccgagatcgcgcagagacttgaagatgtctttgctgggaaaaacacagatcttgaggctctcatggaatggctaaagacaagacc

SEQ ID NO: 22479 - DNA, 174 bp, synthetic construct
  source 1..174: mol_type = other DNA
caattctgggatggaaccgactactttgggtgtccgtgtttcctgtttcacttaccttggctgcttatggtgacaattgtatagttgtcatcatatagctattggattggccatccggatattattcttgtgtttatttgtgtaatttgatataatttagaaccctgtataaga

SEQ ID NO: 22480 - DNA, 174 bp, synthetic construct
  source 1..174: mol_type = other DNA
gtgcagttttggatagtgaaggatgccctgacggtacccataggtaacaagtgacactatggatctaagcaggggctcactctacgctgctttacagctggctgtgagttaaaaaacgtctagctatccacaacctaggggactaggttttccttttatttagattacaattat

SEQ ID NO: 22481 - DNA, 174 bp, synthetic construct
  source 1..174: mol_type = other DNA
agcaaaagcaggggataattctattaaccatgaagactatcattgctttgagctacattctatgtctggttttcgctcaaaaacttcccggaaatgacaacagcacggcaacgctgtgccttgggcaccatgcagtaccaaacggaacgatagtgaaaacaatcacgaatgacc

SEQ ID NO: 22482 - DNA, 219 bp, synthetic construct
  source 1..219: mol_type = other DNA
atataatacttgagatgcactgtttcatggttacccatcatttgaggaaatttccaataaacttgaatgtaaggcttgaaacagtggtctaggtgccctatttagggtgaggagcctagctggcagccccagtgaatcctctattggatagaaaccgctatatcgggtagctatagcagtcggatagtaatatatccggcgtttcgaaataccatacct

SEQ ID NO: 22483 - DNA, 177 bp, synthetic construct
  source 1..177: mol_type = other DNA
gatctgattagaagtaagaaaattcctagttataatatttttaatactgctacatttttaagacccttagttatttagctttaccgcccaggatggggtgcagcgttcctgcaatatccagggcacctaggtgcagccttgtagttttagtggactttaggctaaagaatttcacta

SEQ ID NO: 22484 - DNA, 148 bp, synthetic construct; identical to SEQ ID NO: 22462
  source 1..148: mol_type = other DNA

SEQ ID NO: 22485 - DNA, 116 bp, synthetic construct
  source 1..116: mol_type = other DNA
ctctctctcactggtcctcctactttgtcatctgattcctgaaatcaaaccgattcacacatcctacaacacacacgactcatcgaagcagcaacacataagcatcaacactggaa

SEQ ID NO: 22486 - DNA, 113 bp, synthetic construct
  source 1..113: mol_type = other DNA
ctctctaagcgacagcgacgcaacaggaaaacggaagaaaggcggagagaaaagtgcgaagaagagattggtagctagccacgcggctagctctgttttaaacaagaaaagaa

SEQ ID NO: 22487 - DNA, 742 bp, synthetic construct; identical to SEQ ID NO: 19992
  source 1..742: mol_type = other DNA

SEQ ID NO: 22488 - DNA, 721 bp, synthetic construct
  source 1..721: mol_type = other DNA
tttgaaatggggggctgggccctgatgcccagtccttcctttccccttccggggggttaaccggctgtgtttgctagaggcacagaggggcaacatccaacctgcttttgcggggaacggtgcggctccgattcctgcgtcgccaaaggtgttagcgcacccaaacggcgcacctaccaatgttattggtgtggtctgcgagttctagcctactcgtttctcccccgaccattcactcacccacgaaaagtgtgttgtaaccataagatttaacccccgcacgggatgtgcgataaccgtaagactggctcaagcgcggaaagcgctgtaaccacatgctgttagtccctttatggctgcaagatggctacccacctcggatcactgaactggagctcgaccctccttagtaagggaaccgagaggccttcgtgcaacaagctccgacacagagtccacgtgactgctaccaccatgagtacatggttctcccctctcgacccaggacttctttttgaatatccacggctcgatccagagggtggggcatgacccctagcatagcgagctacagcgggaactgtagctaggccttagcgtgccttggatactgcctgatagggcgacggcctagtcgtgtcggttctataggtagcacatacaaatatgcagaactctcatttttctttcgatacagcctctggcacctttgaagatgtaa

SEQ ID NO: 22489 - DNA, 161 bp, synthetic construct
  source 1..161: mol_type = other DNA
ttttcaaaagttctctcctagaacttttcccacctctttcttgtcacttttgctagtttctctctgtttttctccattcttactagttggtgttgttcggttgtttggcttccctgctctttttccttccttccttcgcttttgttttggtttgctttacc

SEQ ID NO: 22490 - DNA, 101 bp, synthetic construct
  source 1..101: mol_type = other DNA
tagcttgtttgggttctttatcactgtcctgattaaggctgaatcagaacactttcacttccacacacacgacagtagtaagacacaaaatatagtagtta

SEQ ID NO: 22491 - DNA, 153 bp, synthetic construct
  source 1..153: mol_type = other DNA
actgggctgatgattatgactccgatgaggattacggtctggagagagaggctgcaacaaatgcgcccgcagagaaaactgctcaaacaaactcagcagagaagactgctccatcaacttcagcagagaaaactgctccaacaaacaagcctt

SEQ ID NO: 22492 - DNA, 143 bp, synthetic construct
  source 1..143: mol_type = other DNA
aaataacaaatctcaacacaacatatacaaaacaaacgaatctcaagcaatcaagcattctacttctattgcagcaatttaaatcatttcttttaaagcaaaagcaattttctgaaaattttcaccatttacgaacgatagca

SEQ ID NO: 22493 - DNA, 449 bp, synthetic construct
  source 1..449: mol_type = other DNA
gcgaattcaaacgagatgcctaagagtttggattcgctagctgtccggatggtagtgttacctgtggtccaccacggtaaagcattaagggctagccttaacctcactggaattgaatgaaagtgggagatcagtggcctccaacggttggactgactggacggggggtaatcgagtgggagtcccccacatcctacatttatgtagttcctcacgatccacagcaatcgtctggttgtatccaggttactgccgcgagcgtaagggagtgttttggcagacacaatccaatatgctgactacggtcggtgtggaggatccgaaacgtaagcaagtttcttgttactattgatcaacagctacatcctacaacgacagctatcataccagccatctttaacccaagaattccacgtgaacataccttgagtatacaattcttgagcaaa

SEQ ID NO: 22494 - DNA, 297 bp, synthetic construct
  source 1..297: mol_type = other DNA
accatcaacactccaggctcatggattaagttaggttccgccgaagcgggctaaccaggcccctagtaggaggcgcctatcccatgagccctttccccacagattgagtggagctggagctgggaaggaccgagtacggtccaatcgagaagaaccctgatgaacattccaggcctcttcggtagatttgggtatacccaccagtgaaggcggggtcgtgggcacaggccccctagtccacacagcctgatagggtcctgccgcaggatctgtgggtgcggctgtacatgtaacatg

SEQ ID NO: 22495 - DNA, 739 bp, synthetic construct
  source 1..739: mol_type = other DNA
aaaattaaagatcatattacataaaataacataatataaaatcacttaaaatcatgtgttttaaactacgcttagtttaattagttttggtgcgtttagcgattcgtcattgtacatggtgtgttgtgtgttttatgattttagtatgtttcttaaattattgaagccctataaggaccggctataaacgtcctgttttcaagtgggaaaagaaaccactcgccttaccactagctgggatctagctagagctccggcgtaaaacgagctacgcttttggatgcagcgttacgcattcctgggcttaggcgattgtactacaatgggtagcccccagtgccagtttttggcccgctattgtattacaattcggttaagttaacttggttggaaacaagccaaatgctagctatcattcgcattcggacatgaggaaggtgaacgcagtgaatcatagtggtggtacgctcttggggtggttcccaagacttcgtagggctatggttagctgttagtaagacctaatgttcgtttgtgatacagtcgaaagttgtttccgtatggagctcggtctgcgcgttaagcaccagcctgactatgggcagtatccctgtttttccactattctcactatcaaccacaacgcacgactttctgctctcttggcactttcttactttcacactctcgcgctcgtttcaaagttttattacttctctttttctcctgaccattcacg

SEQ ID NO: 22496 - DNA, 119 bp, synthetic construct
  source 1..119: mol_type = other DNA
ggaaagagagtttcaacgttagtggtaacccacgagcggagagctcttacggaggagctctccgtcgatggcgaaagccctttctaacaaacaaccaacaattcttatctacatgaatc

SEQ ID NO: 22497 - DNA, 215 bp, synthetic construct
  source 1..215: mol_type = other DNA
caaaagaacgattcaaagcaattgcatccactaaaaccctaccatgcaagccaccccactcacgacaaaccttagaacctaaccacaatgtctcactacgtcagtaacagtgagcagaagtatagtgagcgggaagctactttcatcgcgattcggggtgcagccaacgctgtgatcaatgcgagggcagaggctgattcgcttaaggtgtggga

SEQ ID NO: 22498 - DNA, 96 bp, synthetic construct
  source 1..96: mol_type = other DNA
agttgttagtctacgtggaccgacaaagacagattctttgagggagctaagctcaacgtagttctaacagttttttaattagagagcagatctctg

SEQ ID NO: 22499 - DNA, 107 bp, synthetic construct
  source 1..107: mol_type = other DNA
agttgttgatctgtgtgaatcagactgcgacagttcgagtttgaagcgaaagctagcaacagtatcaacaggttttattttggatttggaaacgagagtttctggtc

SEQ ID NO: 22500 - DNA, 542 bp, synthetic construct
  source 1..542: mol_type = other DNA
gtcgaaggcatctagcaataagataggtggaacaaggacgcttaaagcataaagacaataatcttttctaactcacacattggtgtgaggtggcagatggcgtgccataactctaatagtgagataccacgcttgtggaccttatgctcacacagccatcctctagtaagtttgtgaggtgtctgatgacgtgtgggaacttgttggaaatgacagcttgctgcaaagcatcccattgccagcggactaacacctggtaacaggtgcctctggggccaaaagccaaggtttaacagaccctttgggattggttcaaacctgagctgtcatggaagacacttagtacctgctgatttggtagcaatacaaacactagttgtaaggcccacgaaggatgcccagaaggtacccgtaggtaacaagtgacactatagatctgatctggggccggctacctctatcttggtgagtcggttaaaaaacgtctagtgggccaaacccaggggggatccctggtttccttttattttactaatgcaact

SEQ ID NO: 22501 - DNA, 562 bp, synthetic construct
  source 1..562: mol_type = other DNA
actctgctattacggtagccttgtatgccagttttatctcccctcccccatgtaacttagaagttttacacaaggaccaatagtcggtaatcagccagattactaaaggtcaagcacttctgtttccccggtcaatgctgatatgctccaacagggcaaaaacagcagcgatcgttatccgcaaagcgcctacgcaaagcttagtagcatctccgaaattgtctggttggtcgttccgccattttccccttggtagacctggcagatgaggctagaaataccccactggcgacagtgttctagcctgcgtggctgcctgcacaccctatgggtgtgaagccaaacaatggacaaggtgtgaagagccccgtgtgctcgctttgactcctccggcccctgaatgtggctaaccttaaccctgcagctagagcacgcaaaccagcgtgtttctagtcgtaatgagcaattgcgggatgggaccaactactttgggtgtccgtgtttcactttttctttttatattgcttatggtgacaatatatacatcatatatattgacacc

SEQ ID NO: 22502 - DNA, 512 bp, synthetic construct
  source 1..512: mol_type = other DNA
tgtaacttagaagttttacacaaggaccaatagtcggtaatcagccagattactaaaggtcaagcacttctgtttccccggtcaatgctgatatgctccaacagggcaaaaacagcagcgatcgttatccgcaaagcgcctacgcaaagcttagtagcatctccgaaattgtctggttggtcgttccgccattttccccttggtagacctggcagatgaggctagaaataccccactggcgacagtgttctagcctgcgtggctgcctgcacaccctatgggtgtgaagccaaacaatggacaaggtgtgaagagccccgtgtgctcgctttgactcctccggcccctgaatgtggctaaccttaaccctgcagctagagcacgcaaaccagcgtgtttctagtcgtaatgagcaattgcgggatgggaccaactactttgggtgtccgtgtttcactttttctttttatattgcttatggtgacaatatatacatcatatatattgacacc

SEQ ID NO: 22503 - DNA, 563 bp, synthetic construct
  source 1..563: mol_type = other DNA
actctattattacggtaattttgtacgccagttttatctcccttaccccctttgtaacttagaagatttaaacacagaccaataggcgacgatcatccagatcgtttaaggtcaagcacttctgtttccccggtcaatgctgatatgctctaccagggcaaaaacagtagagatcgttatccgcaaggtgcctacacaaagcttagtaacattttgaagagcatttggttggtcgctcagctattaccccatagtagacctggcagatgaggctagaagttccccactggcgacagtgttcttgcctgcgtggctgcctgcgcactctcatgagtgcgaagccatatgtttgacaaggtgtgaagagccccgtgtgctcaccttgagtcctccggcccctgaatgtggctaaccttaaccctgcagctagtgcatgaaatccatcatgtaactagtcgtaatgagcaattgcgggatgggaccaactactttgggtgtccgtgtttcactttttccttttatatttgcttatggtgacaatatatatagcatatattgacacc

SEQ ID NO: 22504 - DNA, 513 bp, synthetic construct
  source 1..513: mol_type = other DNA
tttgtaacttagaagatttaaacacagaccaataggcgacgatcatccagatcgtttaaggtcaagcacttctgtttccccggtcaatgctgatatgctctaccagggcaaaaacagtagagatcgttatccgcaaggtgcctacacaaagcttagtaacattttgaagagcatttggttggtcgctcagctattaccccatagtagacctggcagatgaggctagaagttccccactggcgacagtgttcttgcctgcgtggctgcctgcgcactctcatgagtgcgaagccatatgtttgacaaggtgtgaagagccccgtgtgctcaccttgagtcctccggcccctgaatgtggctaaccttaaccctgcagctagtgcatgaaatccatcatgtaactagtcgtaatgagcaattgcgggatgggaccaactactttgggtgtccgtgtttcactttttccttttatatttgcttatggtgacaatatatatagcatatattgacacc

SEQ ID NO: 22505 - DNA, 563 bp, synthetic construct
  source 1..563: mol_type = other DNA
actctattattccggtaatcttgtacgccagttttatatcccctacccctttgtaacttagaagttaaacacacagaccaataggcggtggctatccaagtcactaatggtcaagcacttctgtttccccggtcaagattgatacgctccaacagggcgaaaacagtcaagatcgttaaccgcaaagtgactacgcaaagcttagtaatgccttgaagagtctatggctggtcgttccgctataaccccctagtagacctggcagatgaggctagaaacaccccactggcaacagtgttctagcctgcgtggctgcctgcacaccctttcgggtgtgaagccatatatttgacaaggtgtgaagagccccgtgtgctcactttgagtcctccggcccctgaatgtggctaaccttaaccctgcagctagcgtatgtaatccaacatattgctagtcgtaatgagcaattgcgggatgggaccaactactttgggtgtccgtgtttcacttttttccttttatttgcttatggtgacaatatatatagtatatatattggcatc

SEQ ID NO: 22506 - DNA, 513 bp, synthetic construct
  source 1..513: mol_type = other DNA
ttgtaacttagaagttaaacacacagaccaataggcggtggctatccaagtcactaatggtcaagcacttctgtttccccggtcaagattgatacgctccaacagggcgaaaacagtcaagatcgttaaccgcaaagtgactacgcaaagcttagtaatgccttgaagagtctatggctggtcgttccgctataaccccctagtagacctggcagatgaggctagaaacaccccactggcaacagtgttctagcctgcgtggctgcctgcacaccctttcgggtgtgaagccatatatttgacaaggtgtgaagagccccgtgtgctcactttgagtcctccggcccctgaatgtggctaaccttaaccctgcagctagcgtatgtaatccaacatattgctagtcgtaatgagcaattgcgggatgggaccaactactttgggtgtccgtgtttcacttttttccttttatttgcttatggtgacaatatatatagtatatatattggcatc

SEQ ID NO: 22507 - DNA, 564 bp, synthetic construct
  source 1..564: mol_type = other DNA
ctctgttatttcggtaaccttgtacgccagttttatctcccctcccccaattgtaacttagaagcaatacacaaggaccaataggcagtgattaaccagatcacttaaggtcaagcacttctgtttccccggtctgagttgatatgctctaacagggcaaaaacaagtcagatcgttatccgcaaagtgcctacgcaaagcctagtatcatctttgaaaatgtatggttggtcattccgctgaaccccacagtagacctggcagatgaggctagaaaccccccactggcgacagtgttctagcctgcgtggctgcctgcacacccttatgggtgtgaagccatatatttgacaaggtgtgaagagccccgtgtgctcactttgagtcctccggcccctgaatgtggctaaccctaaccctgcagctagtgcatacaagccagtatgttgctagtcgtaacgagcaattgcgggatgggaccaactactttgggtgtccgtgtttcactttttacctttatactgcttatggtgacaatatatatatagcatatatattgacacc

SEQ ID NO: 22508 - DNA, 514 bp, synthetic construct
  source 1..514: mol_type = other DNA
ttgtaacttagaagcaatacacaaggaccaataggcagtgattaaccagatcacttaaggtcaagcacttctgtttccccggtctgagttgatatgctctaacagggcaaaaacaagtcagatcgttatccgcaaagtgcctacgcaaagcctagtatcatctttgaaaatgtatggttggtcattccgctgaaccccacagtagacctggcagatgaggctagaaaccccccactggcgacagtgttctagcctgcgtggctgcctgcacacccttatgggtgtgaagccatatatttgacaaggtgtgaagagccccgtgtgctcactttgagtcctccggcccctgaatgtggctaaccctaaccctgcagctagtgcatacaagccagtatgttgctagtcgtaacgagcaattgcgggatgggaccaactactttgggtgtccgtgtttcactttttacctttatactgcttatggtgacaatatatatatagcatatatattgacacc

SEQ ID NO: 22509 - DNA, 571 bp, synthetic construct
  source 1..571: mol_type = other DNA
ctggtattctgtacctttgtacgcctgtttgccgcccctcccccttttattaccacatttgtggtcgctgcaacgttagaagattttaaagtagtgcaataggaagcatcacaaccagtggtgttatgcacaaacacttctgtttccccggagcgaggtatagacggtccccactgtcaaaagcctttaaccgttatccgccaaccaactacgagacagctagtaatgccctgttctcctgcaaggcgttcgatcagacagatttcccctctgttagtctggtcgatgaggctagaagtaccccacaggtaactgtgttctagcctgcgtggcggccagcccagcttctgctgggacgcctttcaagagacatggtgtgaagactcaattgtgcttggttgtgagtcctccggcccctgaatgcggctaaccttaaacccggatccatgctatgcaaaccagcatagttatggtcgtaatgggcaactctgggatgggaccgactactttgggtgtccgtgtttccatttttactttttgtgtcatttatggttacaattaagttgtaacc

SEQ ID NO: 22510 - DNA, 521 bp, synthetic construct
  source 1..521: mol_type = other DNA
taccacatttgtggtcgctgcaacgttagaagattttaaagtagtgcaataggaagcatcacaaccagtggtgttatgcacaaacacttctgtttccccggagcgaggtatagacggtccccactgtcaaaagcctttaaccgttatccgccaaccaactacgagacagctagtaatgccctgttctcctgcaaggcgttcgatcagacagatttcccctctgttagtctggtcgatgaggctagaagtaccccacaggtaactgtgttctagcctgcgtggcggccagcccagcttctgctgggacgcctttcaagagacatggtgtgaagactcaattgtgcttggttgtgagtcctccggcccctgaatgcggctaaccttaaacccggatccatgctatgcaaaccagcatagttatggtcgtaatgggcaactctgggatgggaccgactactttgggtgtccgtgtttccatttttactttttgtgtcatttatggttacaattaagttgtaacc

SEQ ID NO: 22511 - DNA, 587 bp, synthetic construct
  source 1..587: mol_type = other DNA
gtgcttaggtgccacaccactgcggtttgggttcccctttcccctatatatgtttgtctgtttatttcaaattcttgaggattggcacctccttatgccaaatctaaatcgtggaggatcccaggctttctggtctcaaacagaactccacgtccaggtcataggaactggttagtaggctatttgagtagtccgtttgttagtaatgccttgtgaacagggtggctcccgtttactgctggtattcccggtgcaggttgccgtggtggtgacaccatcctgcattgtgtgtgaaccagtaccgcaaggatagcaaggtatgaacacttatgggtgaaataataagtgactaatccactttcatggccggaaggtcatgtggcaatcatgccacccaggtaccctcttaggaggatctgagggtgggctaagcagaccctgccatgtggctgaaattttctattattttattccataacatttatagctatataggtgttttgtgtgttgtgctctccttttccgagttatttccagtactagttcgcagctagaagtttaactcttcgatatcggctacattggaa

SEQ ID NO: 22512 - DNA, 537 bp, synthetic construct
  source 1..537: mol_type = other DNA
tgtttgtctgtttatttcaaattcttgaggattggcacctccttatgccaaatctaaatcgtggaggatcccaggctttctggtctcaaacagaactccacgtccaggtcataggaactggttagtaggctatttgagtagtccgtttgttagtaatgccttgtgaacagggtggctcccgtttactgctggtattcccggtgcaggttgccgtggtggtgacaccatcctgcattgtgtgtgaaccagtaccgcaaggatagcaaggtatgaacacttatgggtgaaataataagtgactaatccactttcatggccggaaggtcatgtggcaatcatgccacccaggtaccctcttaggaggatctgagggtgggctaagcagaccctgccatgtggctgaaattttctattattttattccataacatttatagctatataggtgttttgtgtgttgtgctctccttttccgagttatttccagtactagttcgcagctagaagtttaactcttcgatatcggctacattggaa

SEQ ID NO: 22513 - DNA, 597 bp, synthetic construct
  source 1..597: mol_type = other DNA
caaatgtaacaaacatctaagaagattgtgtggaaccctatgcctggtctccactattcgaaggcagcttgcaataagaagagtggaattaagacgctcaaagcatagagacaattttcttttctaacccatacttgtatggggtggcagatggcgtgccataactctaatagtgagataccatgcttgtggaccttatgctcacacagccatcctctagtaagtttgtgagacgtctggtgacgtgtgggaacttattggaaacaacattttgctgcaaagcatcctattgccagcggaacaacacctggtaacaggtgcctctggggccaaaagccaaggtttaacagaccctttaggattggttctaaacctgaaatgttgtggaagacacttagtacctgccgatctggtagtaatacaaacactagttgtaaggcccacgaaggatgcccagaaggtacccgtaggtaacaagtgacactatggatctgatctggggccaactacctctatcttggtgagttggttaaaaaacgtctagtgggccaaacccaggggggatccctggtttccttttattttatcattactaat

SEQ ID NO: 22514 - DNA, 547 bp, synthetic construct
  source 1..547: mol_type = other DNA
ccactattcgaaggcagcttgcaataagaagagtggaattaagacgctcaaagcatagagacaattttcttttctaacccatacttgtatggggtggcagatggcgtgccataactctaatagtgagataccatgcttgtggaccttatgctcacacagccatcctctagtaagtttgtgagacgtctggtgacgtgtgggaacttattggaaacaacattttgctgcaaagcatcctattgccagcggaacaacacctggtaacaggtgcctctggggccaaaagccaaggtttaacagaccctttaggattggttctaaacctgaaatgttgtggaagacacttagtacctgccgatctggtagtaatacaaacactagttgtaaggcccacgaaggatgcccagaaggtacccgtaggtaacaagtgacactatggatctgatctggggccaactacctctatcttggtgagttggttaaaaaacgtctagtgggccaaacccaggggggatccctggtttccttttattttatcattactaat

SEQ ID NO: 22515 - DNA, 599 bp, synthetic construct
  source 1..599: mol_type = other DNA
tcaatcgtaactaacatctaagaatattatttcaaccccatgcctggtctccactagttgaaggcaacttgcaataaaatgagtggaaacaagacgcttaaagcatggtgtaaattaccttttctaacctacactttgtgtggggtggcagatggcgtgccataattctattagtgagataccacgcttgtggaccttatgctcacacagccatcctctagtaagtttgcaagatgtctggtgacgtgtgggaacttattggaaacaacattttgctgcaaagcatcctactgccagcggaataacacctggtgacaggtgcctctggggccaaaagccaaggtttaacagaccctttaggattggttttaaaacctgaaatgttgtggaagatacttagtacctgccgatctggtagtagtgcaaacactagttgtaaggcccacgaaggatgcccagaaggtacccgtaggtaacaagtgacactatggatctgatctggggccaagtacctctatcttggtgacttggttaaaaaacgtctagtgggccaaacccgggggggatccctggtttccttttattttaccaatgccact

SEQ ID NO: 22516 - DNA, 549 bp, synthetic construct
  source 1..549: mol_type = other DNA
ccactagttgaaggcaacttgcaataaaatgagtggaaacaagacgcttaaagcatggtgtaaattaccttttctaacctacactttgtgtggggtggcagatggcgtgccataattctattagtgagataccacgcttgtggaccttatgctcacacagccatcctctagtaagtttgcaagatgtctggtgacgtgtgggaacttattggaaacaacattttgctgcaaagcatcctactgccagcggaataacacctggtgacaggtgcctctggggccaaaagccaaggtttaacagaccctttaggattggttttaaaacctgaaatgttgtggaagatacttagtacctgccgatctggtagtagtgcaaacactagttgtaaggcccacgaaggatgcccagaaggtacccgtaggtaacaagtgacactatggatctgatctggggccaagtacctctatcttggtgacttggttaaaaaacgtctagtgggccaaacccgggggggatccctggtttccttttattttaccaatgccact

SEQ ID NO: 22517 - DNA, 601 bp, synthetic construct
  source 1..601: mol_type = other DNA
cctcaaatgcaacaaacatctaagactattgagaacaaccctgtacctggtccccactagtcgaaggcatctagcaataagatgagtggaatatgggcgcttaaagtacagagtcaatgatcttttctagcctacgcttatgcgtggggtggcagatggcgtgccataaccctattagtgagataccacacttgtggaccttatgctcacacagccatcctccagttagtttgtaagatgtctggtgatgtgtgggaacttgttggaaataacattttgctgtaaggcattcattagccagcggataaaacacctggtaacaggtgcctctggggccaaaagccaaggtttaacagaccctaatgaattggttcaaacctggaatgttatggaagatacttagtacctgctgatctggtagtaatgcaaacactggttgtaaggcccacgaaggatgcccagaaggtacccgcaggtaacaagagacactgtggatctgatctggggctagttgcctctttaaggtgaactagttaaaaaacgtctagtgggccaaacccaggggggatccctggtttcctttattatttgaatgttcatc

SEQ ID NO: 22518 - DNA, 551 bp, synthetic construct
  source 1..551: mol_type = other DNA
tccccactagtcgaaggcatctagcaataagatgagtggaatatgggcgcttaaagtacagagtcaatgatcttttctagcctacgcttatgcgtggggtggcagatggcgtgccataaccctattagtgagataccacacttgtggaccttatgctcacacagccatcctccagttagtttgtaagatgtctggtgatgtgtgggaacttgttggaaataacattttgctgtaaggcattcattagccagcggataaaacacctggtaacaggtgcctctggggccaaaagccaaggtttaacagaccctaatgaattggttcaaacctggaatgttatggaagatacttagtacctgctgatctggtagtaatgcaaacactggttgtaaggcccacgaaggatgcccagaaggtacccgcaggtaacaagagacactgtggatctgatctggggctagttgcctctttaaggtgaactagttaaaaaacgtctagtgggccaaacccaggggggatccctggtttcctttattatttgaatgttcatc

SEQ ID NO: 22519 - DNA, 501 bp, synthetic construct
  source 1..501: mol_type = other DNA
ttaaagtacagagtcaatgatcttttctagcctacgcttatgcgtggggtggcagatggcgtgccataaccctattagtgagataccacacttgtggaccttatgctcacacagccatcctccagttagtttgtaagatgtctggtgatgtgtgggaacttgttggaaataacattttgctgtaaggcattcattagccagcggataaaacacctggtaacaggtgcctctggggccaaaagccaaggtttaacagaccctaatgaattggttcaaacctggaatgttatggaagatacttagtacctgctgatctggtagtaatgcaaacactggttgtaaggcccacgaaggatgcccagaaggtacccgcaggtaacaagagacactgtggatctgatctggggctagttgcctctttaaggtgaactagttaaaaaacgtctagtgggccaaacccaggggggatccctggtttcctttattatttgaatgttcatc

SEQ ID NO: 22520 - DNA, 630 bp, synthetic construct
  source 1..630: mol_type = other DNA
cccagccctgaggcggctggtcaataaaagcctcaattgtaacaaacatctaagcttattacaataaccccatgcctggtctccactagttgaaggcaacttgcaataaaatgagtggaaatgagacgcttaaagcatggtgtaaactaacttttctagcccacactttgtgtggggtggcagatggcgtgccataattctaatagtgggataccacgcttgtggaccttatgctcacacagccatcctctagtaagtttgtgtgacgtctggtgacgtgtgggaacttattggaaacaacattttgctgtaaagcatcctattgccagcggaacaacgcctggtaacaggtgcctctggggccaaaagccaaggtttagcagaccctctaggattggtttaaaacctgaaatgttgtggaagatacttagtacctaccgatctggtagtaatgcagacactagttgtaaggcccacgaaggatgcccagaaggtacctgtaggtaacaagcgacactatggatctgatctggggccaggtacctctatcttggtgacctggttaaaaaacgtctagtgggccaaacccgggggggatccccggtttccttttattttatcaatgccact

SEQ ID NO: 22521 - DNA, 580 bp, synthetic construct
  source 1..580: mol_type = other DNA
taagcttattacaataaccccatgcctggtctccactagttgaaggcaacttgcaataaaatgagtggaaatgagacgcttaaagcatggtgtaaactaacttttctagcccacactttgtgtggggtggcagatggcgtgccataattctaatagtgggataccacgcttgtggaccttatgctcacacagccatcctctagtaagtttgtgtgacgtctggtgacgtgtgggaacttattggaaacaacattttgctgtaaagcatcctattgccagcggaacaacgcctggtaacaggtgcctctggggccaaaagccaaggtttagcagaccctctaggattggtttaaaacctgaaatgttgtggaagatacttagtacctaccgatctggtagtaatgcagacactagttgtaaggcccacgaaggatgcccagaaggtacctgtaggtaacaagcgacactatggatctgatctggggccaggtacctctatcttggtgacctggttaaaaaacgtctagtgggccaaacccgggggggatccccggtttccttttattttatcaatgccact

SEQ ID NO: 22522 - DNA, 530 bp, synthetic construct
  source 1..530: mol_type = other DNA
ttgcaataaaatgagtggaaatgagacgcttaaagcatggtgtaaactaacttttctagcccacactttgtgtggggtggcagatggcgtgccataattctaatagtgggataccacgcttgtggaccttatgctcacacagccatcctctagtaagtttgtgtgacgtctggtgacgtgtgggaacttattggaaacaacattttgctgtaaagcatcctattgccagcggaacaacgcctggtaacaggtgcctctggggccaaaagccaaggtttagcagaccctctaggattggtttaaaacctgaaatgttgtggaagatacttagtacctaccgatctggtagtaatgcagacactagttgtaaggcccacgaaggatgcccagaaggtacctgtaggtaacaagcgacactatggatctgatctggggccaggtacctctatcttggtgacctggttaaaaaacgtctagtgggccaaacccgggggggatccccggtttccttttattttatcaatgccact

SEQ ID NO: 22523 - DNA, 647 bp, synthetic construct
  source 1..647: mol_type = other DNA
ctctaggagagcccctttcccagccttgaggcggctggtcaataaaagcctcaaacgtaactaacacctaagataaatctcataaccctatgcctggtccccactagtcgaaagcacctagcaataagatgagtggaccatggacgcttaaagcatagtgccaatatacatttctaacctgtggattcccatggggtggcagatggcgtgccataattctattagtgggataccacgcttgtggatcttatgcccacacagccatcctctagtaagtttgtaaggcgtctgatgacgtgtgggaacttatcggaaacaacaatttgctgcaaagcatcctattgccagcggacaaacacctggtaacaggtgcctctggggccaaaagccaaggtttaacagaccctttaggattggttcttacctggattgttgtggaaggtacttagtacctgctgatttggtagttggacaaacactagttgtaaggcccacgaaggatgcccagaaggtacccgtaggtaacaagggacactatggatctgatttggggtcacctacctctatcttggtgaggtgattaaaaagcgtctagtgggccaaacccaggggggatccctggtttccttttattttacacagacact

SEQ ID NO: 22524 - DNA, 597 bp, synthetic construct
  source 1..597: mol_type = other DNA
tcaaacgtaactaacacctaagataaatctcataaccctatgcctggtccccactagtcgaaagcacctagcaataagatgagtggaccatggacgcttaaagcatagtgccaatatacatttctaacctgtggattcccatggggtggcagatggcgtgccataattctattagtgggataccacgcttgtggatcttatgcccacacagccatcctctagtaagtttgtaaggcgtctgatgacgtgtgggaacttatcggaaacaacaatttgctgcaaagcatcctattgccagcggacaaacacctggtaacaggtgcctctggggccaaaagccaaggtttaacagaccctttaggattggttcttacctggattgttgtggaaggtacttagtacctgctgatttggtagttggacaaacactagttgtaaggcccacgaaggatgcccagaaggtacccgtaggtaacaagggacactatggatctgatttggggtcacctacctctatcttggtgaggtgattaaaaagcgtctagtgggccaaacccaggggggatccctggtttccttttattttacacagacact

SEQ ID NO: 22525 - DNA, 547 bp, synthetic construct
  source 1..547: mol_type = other DNA
ccactagtcgaaagcacctagcaataagatgagtggaccatggacgcttaaagcatagtgccaatatacatttctaacctgtggattcccatggggtggcagatggcgtgccataattctattagtgggataccacgcttgtggatcttatgcccacacagccatcctctagtaagtttgtaaggcgtctgatgacgtgtgggaacttatcggaaacaacaatttgctgcaaagcatcctattgccagcggacaaacacctggtaacaggtgcctctggggccaaaagccaaggtttaacagaccctttaggattggttcttacctggattgttgtggaaggtacttagtacctgctgatttggtagttggacaaacactagttgtaaggcccacgaaggatgcccagaaggtacccgtaggtaacaagggacactatggatctgatttggggtcacctacctctatcttggtgaggtgattaaaaagcgtctagtgggccaaacccaggggggatccctggtttccttttattttacacagacact

SEQ ID NO: 22526 - DNA, 652 bp, synthetic construct
  source 1..652: mol_type = other DNA
ttgctgagtttctctaggagagtccctttcccagccagaggtggctggtcaaacaataccaaacgtaactaaacatctaagataacatagccctatgcctggtctccaccagttgaaggcatcttgcaataaaatgggtggattaagacgcttaaagcatggagtcaattatcttttctaactagtgatcttcactgggtggcagatggcgtgccataactctattagtgggataccacgctcgtggatcttatgcccacacagccatcctctagtaagtttgcaaggtgtctgatgaggcgtgggaacttattggaaataattacttgctgcgaagcatcctactgccagcggatcaacacctggtaacaggtgcccctggggccaaaagccacggtttaacagaccctttaggattggttaaaacctgagtaattatggaagatacttagtacctaccaacttggtaacagtgcaaacactagttgtaaggcccacgaaggatgcccagaaggtacccgcaggtaacaagagacactgtggatctgatctggggccacctacctctatcctggtgaggtggttaaaaaacgtctagtgggccaaacccaggggggatccctggtttccttattttagtgtaaatgtcatt

SEQ ID NO: 22527 - DNA, 602 bp, synthetic construct
  source 1..602: mol_type = other DNA
aaacaataccaaacgtaactaaacatctaagataacatagccctatgcctggtctccaccagttgaaggcatcttgcaataaaatgggtggattaagacgcttaaagcatggagtcaattatcttttctaactagtgatcttcactgggtggcagatggcgtgccataactctattagtgggataccacgctcgtggatcttatgcccacacagccatcctctagtaagtttgcaaggtgtctgatgaggcgtgggaacttattggaaataattacttgctgcgaagcatcctactgccagcggatcaacacctggtaacaggtgcccctggggccaaaagccacggtttaacagaccctttaggattggttaaaacctgagtaattatggaagatacttagtacctaccaacttggtaacagtgcaaacactagttgtaaggcccacgaaggatgcccagaaggtacccgcaggtaacaagagacactgtggatctgatctggggccacctacctctatcctggtgaggtggttaaaaaacgtctagtgggccaaacccaggggggatccctggtttccttattttagtgtaaatgtcatt

SEQ ID NO: 22528 - DNA, 552 bp, synthetic construct
  source 1..552: mol_type = other DNA
ggtctccaccagttgaaggcatcttgcaataaaatgggtggattaagacgcttaaagcatggagtcaattatcttttctaactagtgatcttcactgggtggcagatggcgtgccataactctattagtgggataccacgctcgtggatcttatgcccacacagccatcctctagtaagtttgcaaggtgtctgatgaggcgtgggaacttattggaaataattacttgctgcgaagcatcctactgccagcggatcaacacctggtaacaggtgcccctggggccaaaagccacggtttaacagaccctttaggattggttaaaacctgagtaattatggaagatacttagtacctaccaacttggtaacagtgcaaacactagttgtaaggcccacgaaggatgcccagaaggtacccgcaggtaacaagagacactgtggatctgatctggggccacctacctctatcctggtgaggtggttaaaaaacgtctagtgggccaaacccaggggggatccctggtttccttattttagtgtaaatgtcatt

SEQ ID NO: 22529 - DNA, 502 bp, synthetic construct
  source 1..502: mol_type = other DNA
cttaaagcatggagtcaattatcttttctaactagtgatcttcactgggtggcagatggcgtgccataactctattagtgggataccacgctcgtggatcttatgcccacacagccatcctctagtaagtttgcaaggtgtctgatgaggcgtgggaacttattggaaataattacttgctgcgaagcatcctactgccagcggatcaacacctggtaacaggtgcccctggggccaaaagccacggtttaacagaccctttaggattggttaaaacctgagtaattatggaagatacttagtacctaccaacttggtaacagtgcaaacactagttgtaaggcccacgaaggatgcccagaaggtacccgcaggtaacaagagacactgtggatctgatctggggccacctacctctatcctggtgaggtggttaaaaaacgtctagtgggccaaacccaggggggatccctggtttccttattttagtgtaaatgtcatt

SEQ ID NO: 22530 - DNA, 655 bp, synthetic construct
  source 1..655: mol_type = other DNA
ctgagtttctctaggagagtccctttcccagccctgaggcggctggataataaaggcctcacatgtaacaaacatctaagacaaaataatttgccttgcacctggtccccactagttgaaggcatctagcaataagatgagtggaacaaggacgcttaaagtgcaatgatagttatcttttctaacccactatttatagtggggtggtggatggcgcaccataattctaatagtgagataccacgcttgtggaccttatgctcacacagccatcctctagtaagtttgtgagacgtctggtgacgtgtgggaacttactggaaacaatgctttgccgtaaggctttcattagccagcggaccaccacctggtaacaggtgcctctggggccaaaagccaaggtttaatagaccctaatggaatggttcaaacctggagcattgtggaaagtacttagtacctgctgatctggtagtaatgcaaacactagttgtacggcccacgaaggatgcccagaaggtacccgtaggtaacaagtgacactatggatctgatctggggccaactacctctatcttggtgagttggttaaaaaacgtctagtgggccaaacccaggggggatccctggtttccttttattttactttgtcaat

SEQ ID NO: 22531 - DNA, 605 bp, synthetic construct
  source 1..605: mol_type = other DNA
taaaggcctcacatgtaacaaacatctaagacaaaataatttgccttgcacctggtccccactagttgaaggcatctagcaataagatgagtggaacaaggacgcttaaagtgcaatgatagttatcttttctaacccactatttatagtggggtggtggatggcgcaccataattctaatagtgagataccacgcttgtggaccttatgctcacacagccatcctctagtaagtttgtgagacgtctggtgacgtgtgggaacttactggaaacaatgctttgccgtaaggctttcattagccagcggaccaccacctggtaacaggtgcctctggggccaaaagccaaggtttaatagaccctaatggaatggttcaaacctggagcattgtggaaagtacttagtacctgctgatctggtagtaatgcaaacactagttgtacggcccacgaaggatgcccagaaggtacccgtaggtaacaagtgacactatggatctgatctggggccaactacctctatcttggtgagttggttaaaaaacgtctagtgggccaaacccaggggggatccctggtttccttttattttactttgtcaat

SEQ ID NO: 22532 - DNA, 555 bp, synthetic construct
  source 1..555: mol_type = other DNA
cctggtccccactagttgaaggcatctagcaataagatgagtggaacaaggacgcttaaagtgcaatgatagttatcttttctaacccactatttatagtggggtggtggatggcgcaccataattctaatagtgagataccacgcttgtggaccttatgctcacacagccatcctctagtaagtttgtgagacgtctggtgacgtgtgggaacttactggaaacaatgctttgccgtaaggctttcattagccagcggaccaccacctggtaacaggtgcctctggggccaaaagccaaggtttaatagaccctaatggaatggttcaaacctggagcattgtggaaagtacttagtacctgctgatctggtagtaatgcaaacactagttgtacggcccacgaaggatgcccagaaggtacccgtaggtaacaagtgacactatggatctgatctggggccaactacctctatcttggtgagttggttaaaaaacgtctagtgggccaaacccaggggggatccctggtttccttttattttactttgtcaat

SEQ ID NO: 22533 - DNA, 505 bp, synthetic construct
  source 1..505: mol_type = other DNA
gacgcttaaagtgcaatgatagttatcttttctaacccactatttatagtggggtggtggatggcgcaccataattctaatagtgagataccacgcttgtggaccttatgctcacacagccatcctctagtaagtttgtgagacgtctggtgacgtgtgggaacttactggaaacaatgctttgccgtaaggctttcattagccagcggaccaccacctggtaacaggtgcctctggggccaaaagccaaggtttaatagaccctaatggaatggttcaaacctggagcattgtggaaagtacttagtacctgctgatctggtagtaatgcaaacactagttgtacggcccacgaaggatgcccagaaggtacccgtaggtaacaagtgacactatggatctgatctggggccaactacctctatcttggtgagttggttaaaaaacgtctagtgggccaaacccaggggggatccctggtttccttttattttactttgtcaat

SEQ ID NO: 22534 - DNA, 658 bp, synthetic construct
  source 1..658: mol_type = other DNA
ttgctgagcttctctaggagagtccctttcccagccctgaggcggctggttaataatagcctcaagcgtaactaatatctaagaagattgtgcaaaccctatgcctggtctccactattcgaaggcaacttgcaataagaagagtggaatcaagacgcttaaagcatagagacagtattcttttctaacccacattactgtggggtggcagatggcgtgccataattctaatagtgagataccacgcttgtggaccttatgctcacacagccatcctctagtaagtttgtgagacgtctggtgacgtgtgggaacttattggaaacaacattttgctgcaaagcatcctactgccagcggaacaacacctggtaacaggtgcctctggggccaaaagccaaggtttaatagaccctttaggattggttctaaacctgagatgttgtggaaaatatttagtacctgctgacctggtagtaatacaaacactagttgtaaggcccacgaaggatgcccagaaggtacccgtaggtaacaagtgacactatggatctgatctggggccaaccacctctatcttggtgggttggttaaaaaacgtctagtgggccaaacccaggggggatccctggtttccttttattttatcatatttaat

SEQ ID NO: 22535 - DNA, 608 bp, synthetic construct
  source 1..608: mol_type = other DNA
taataatagcctcaagcgtaactaatatctaagaagattgtgcaaaccctatgcctggtctccactattcgaaggcaacttgcaataagaagagtggaatcaagacgcttaaagcatagagacagtattcttttctaacccacattactgtggggtggcagatggcgtgccataattctaatagtgagataccacgcttgtggaccttatgctcacacagccatcctctagtaagtttgtgagacgtctggtgacgtgtgggaacttattggaaacaacattttgctgcaaagcatcctactgccagcggaacaacacctggtaacaggtgcctctggggccaaaagccaaggtttaatagaccctttaggattggttctaaacctgagatgttgtggaaaatatttagtacctgctgacctggtagtaatacaaacactagttgtaaggcccacgaaggatgcccagaaggtacccgtaggtaacaagtgacactatggatctgatctggggccaaccacctctatcttggtgggttggttaaaaaacgtctagtgggccaaacccaggggggatccctggtttccttttattttatcatatttaat

SEQ ID NO: 22536 - DNA, 558 bp, synthetic construct
  source 1..558: mol_type = other DNA
atgcctggtctccactattcgaaggcaacttgcaataagaagagtggaatcaagacgcttaaagcatagagacagtattcttttctaacccacattactgtggggtggcagatggcgtgccataattctaatagtgagataccacgcttgtggaccttatgctcacacagccatcctctagtaagtttgtgagacgtctggtgacgtgtgggaacttattggaaacaacattttgctgcaaagcatcctactgccagcggaacaacacctggtaacaggtgcctctggggccaaaagccaaggtttaatagaccctttaggattggttctaaacctgagatgttgtggaaaatatttagtacctgctgacctggtagtaatacaaacactagttgtaaggcccacgaaggatgcccagaaggtacccgtaggtaacaagtgacactatggatctgatctggggccaaccacctctatcttggtgggttggttaaaaaacgtctagtgggccaaacccaggggggatccctggtttccttttattttatcatatttaat

SEQ ID NO: 22537 - DNA, 508 bp, synthetic construct
  source 1..508: mol_type = other DNA
caagacgcttaaagcatagagacagtattcttttctaacccacattactgtggggtggcagatggcgtgccataattctaatagtgagataccacgcttgtggaccttatgctcacacagccatcctctagtaagtttgtgagacgtctggtgacgtgtgggaacttattggaaacaacattttgctgcaaagcatcctactgccagcggaacaacacctggtaacaggtgcctctggggccaaaagccaaggtttaatagaccctttaggattggttctaaacctgagatgttgtggaaaatatttagtacctgctgacctggtagtaatacaaacactagttgtaaggcccacgaaggatgcccagaaggtacccgtaggtaacaagtgacactatggatctgatctggggccaaccacctctatcttggtgggttggttaaaaaacgtctagtgggccaaacccaggggggatccctggtttccttttattttatcatatttaat

SEQ ID NO: 22538 - DNA, 658 bp, synthetic construct
  source 1..658: mol_type = other DNA
ttgccgagtttctctaagagagtccctttcccagccttgaggcggctggtcaataaatgccttaaatgtaactaacacctaagattgctttaacaaccctatgcctggtctccactagttgaaggcatctagcaataaaatgagtggaatcaagacgcttaaagcatagtgccagcatgcatttctaacctgcagtttttgcagggtggcagatggcgtgccataattctattagtgagatactacgcttgtagatcttatgctcacacagccatcctctagtaagtttgtaagatgtctgatgacgtgtgggaacttattggaaataacaccttgctgtaaagcatcttattgccagcggaacaacacctggtaacaggtgcctctggggccaaaagccaaggtttaacagaccctttaagattggttcaaacctgaggtgttatggaaaatattcagtacctgctgatttggtagtaatgcaaacactagttgtaaggcccacgaaggatgcccagaaggtacccgtaggtaacaagtgacactatggatctgatctggggccaactacctctatcttggtgagttggttaaaaaacgtctagtgggccacacccaggggggatccctggttttcttttattacacaattgtcatt

SEQ ID NO: 22539 - DNA, 608 bp, synthetic construct
  source 1..608: mol_type = other DNA
caataaatgccttaaatgtaactaacacctaagattgctttaacaaccctatgcctggtctccactagttgaaggcatctagcaataaaatgagtggaatcaagacgcttaaagcatagtgccagcatgcatttctaacctgcagtttttgcagggtggcagatggcgtgccataattctattagtgagatactacgcttgtagatcttatgctcacacagccatcctctagtaagtttgtaagatgtctgatgacgtgtgggaacttattggaaataacaccttgctgtaaagcatcttattgccagcggaacaacacctggtaacaggtgcctctggggccaaaagccaaggtttaacagaccctttaagattggttcaaacctgaggtgttatggaaaatattcagtacctgctgatttggtagtaatgcaaacactagttgtaaggcccacgaaggatgcccagaaggtacccgtaggtaacaagtgacactatggatctgatctggggccaactacctctatcttggtgagttggttaaaaaacgtctagtgggccacacccaggggggatccctggttttcttttattacacaattgtcatt

SEQ ID NO: 22540 - DNA, 558 bp, synthetic construct
  source 1..558: mol_type = other DNA
atgcctggtctccactagttgaaggcatctagcaataaaatgagtggaatcaagacgcttaaagcatagtgccagcatgcatttctaacctgcagtttttgcagggtggcagatggcgtgccataattctattagtgagatactacgcttgtagatcttatgctcacacagccatcctctagtaagtttgtaagatgtctgatgacgtgtgggaacttattggaaataacaccttgctgtaaagcatcttattgccagcggaacaacacctggtaacaggtgcctctggggccaaaagccaaggtttaacagaccctttaagattggttcaaacctgaggtgttatggaaaatattcagtacctgctgatttggtagtaatgcaaacactagttgtaaggcccacgaaggatgcccagaaggtacccgtaggtaacaagtgacactatggatctgatctggggccaactacctctatcttggtgagttggttaaaaaacgtctagtgggccacacccaggggggatccctggttttcttttattacacaattgtcatt

SEQ ID NO: 22541 - DNA, 508 bp, synthetic construct
  source 1..508: mol_type = other DNA
caagacgcttaaagcatagtgccagcatgcatttctaacctgcagtttttgcagggtggcagatggcgtgccataattctattagtgagatactacgcttgtagatcttatgctcacacagccatcctctagtaagtttgtaagatgtctgatgacgtgtgggaacttattggaaataacaccttgctgtaaagcatcttattgccagcggaacaacacctggtaacaggtgcctctggggccaaaagccaaggtttaacagaccctttaagattggttcaaacctgaggtgttatggaaaatattcagtacctgctgatttggtagtaatgcaaacactagttgtaaggcccacgaaggatgcccagaaggtacccgtaggtaacaagtgacactatggatctgatctggggccaactacctctatcttggtgagttggttaaaaaacgtctagtgggccacacccaggggggatccctggttttcttttattacacaattgtcatt

SEQ ID NO: 22542 - DNA, 659 bp, synthetic construct
  source 1..659: mol_type = other DNA
ttgctgagctcctctaggagagtccctttcccagccttgaggcggctggtcaataaaagcctcaattgtaacaaacatctaagattattatattaaccccatgcctggtctccgttagttgaaggcaacttgcaataaaatgagcggaaacaagacgcttaaagcatggtgtaaattaacttttctaacccacatcttgtgtggggtggcagatggcgtgccataactctattagtgagataccacgcttgtggaccttatgctcacacagccatcctctagtaagtttgtgagacgtctggtgacgtgtgggaacttattggaaacaacattttgctgtaaagcatcctattgccagcggaacaacacctggtaacaggtgcctctggggccaaaagccaaggtttaacaaaccctttaggattggttctaaacctgagatgttgtggaagatacttagtacctaccgatccggtagtagtgcaaacactagttgtaaggcccacgaaggatgcccagaaggtacccgtaggtaacaagcgacactatggatctgatctggggccaggtacctctatcttggtgatctggttaaaaaacgtctagtgggccaaatccgggggggatccccggtttccttttattttatcaatgccact

SEQ ID NO: 22543 - DNA, 609 bp, synthetic construct
  source 1..609: mol_type = other DNA
caataaaagcctcaattgtaacaaacatctaagattattatattaaccccatgcctggtctccgttagttgaaggcaacttgcaataaaatgagcggaaacaagacgcttaaagcatggtgtaaattaacttttctaacccacatcttgtgtggggtggcagatggcgtgccataactctattagtgagataccacgcttgtggaccttatgctcacacagccatcctctagtaagtttgtgagacgtctggtgacgtgtgggaacttattggaaacaacattttgctgtaaagcatcctattgccagcggaacaacacctggtaacaggtgcctctggggccaaaagccaaggtttaacaaaccctttaggattggttctaaacctgagatgttgtggaagatacttagtacctaccgatccggtagtagtgcaaacactagttgtaaggcccacgaaggatgcccagaaggtacccgtaggtaacaagcgacactatggatctgatctggggccaggtacctctatcttggtgatctggttaaaaaacgtctagtgggccaaatccgggggggatccccggtttccttttattttatcaatgccact

SEQ ID NO: 22544 - DNA, 559 bp, synthetic construct
  source 1..559: mol_type = other DNA
atgcctggtctccgttagttgaaggcaacttgcaataaaatgagcggaaacaagacgcttaaagcatggtgtaaattaacttttctaacccacatcttgtgtggggtggcagatggcgtgccataactctattagtgagataccacgcttgtggaccttatgctcacacagccatcctctagtaagtttgtgagacgtctggtgacgtgtgggaacttattggaaacaacattttgctgtaaagcatcctattgccagcggaacaacacctggtaacaggtgcctctggggccaaaagccaaggtttaacaaaccctttaggattggttctaaacctgagatgttgtggaagatacttagtacctaccgatccggtagtagtgcaaacactagttgtaaggcccacgaaggatgcccagaaggtacccgtaggtaacaagcgacactatggatctgatctggggccaggtacctctatcttggtgatctggttaaaaaacgtctagtgggccaaatccgggggggatccccggtttccttttattttatcaatgccact

SEQ ID NO: 22545 - DNA, 509 bp, synthetic construct
  source 1..509: mol_type = other DNA
caagacgcttaaagcatggtgtaaattaacttttctaacccacatcttgtgtggggtggcagatggcgtgccataactctattagtgagataccacgcttgtggaccttatgctcacacagccatcctctagtaagtttgtgagacgtctggtgacgtgtgggaacttattggaaacaacattttgctgtaaagcatcctattgccagcggaacaacacctggtaacaggtgcctctggggccaaaagccaaggtttaacaaaccctttaggattggttctaaacctgagatgttgtggaagatacttagtacctaccgatccggtagtagtgcaaacactagttgtaaggcccacgaaggatgcccagaaggtacccgtaggtaacaagcgacactatggatctgatctggggccaggtacctctatcttggtgatctggttaaaaaacgtctagtgggccaaatccgggggggatccccggtttccttttattttatcaatgccact

SEQ ID NO: 22546 - DNA, 659 bp, synthetic construct
  source 1..659: mol_type = other DNA
ttgctgagtctctctaggagagtccctttcccagccttgaggcggctggacaataaaagcctcaactgtaacaaacacctaagattattatattaaccccatgcctggtctccactggttgaaggcaacttgcaataaaatgagtggaaataagacgcttgaagcatggtgcaaatctacttttctaacccacactttgtgtggggtggcagatggcgtgccataattctattagtgagataccacgcttgtggaccttatgctcacacagccatcctctagtaagtttgtgaggcgtctggtgacgtgtgggaacttattggaagcaacattttgctgtaaagcatcctatcgccagcggaacaacgcctggtaacaggtgcctctggggccaaaagccaaggtttaacagaccctttaggattggtttaaaacctgaaatgttgtggaaaatacttagtacctaccgacctggtagtaatgcaaacactagttgtaaggcccacgaaggatgcccagaaggtacccgtaggtaacaagtgacactatggatctgatctggggccaggtacttctatcctagtgacctggttaaaaaacgtctagtgggccaaacccgggggggatccccggtttccttttattttactaatgctatt

SEQ ID NO: 22547 - DNA, 609 bp, synthetic construct
  source 1..609: mol_type = other DNA
caataaaagcctcaactgtaacaaacacctaagattattatattaaccccatgcctggtctccactggttgaaggcaacttgcaataaaatgagtggaaataagacgcttgaagcatggtgcaaatctacttttctaacccacactttgtgtggggtggcagatggcgtgccataattctattagtgagataccacgcttgtggaccttatgctcacacagccatcctctagtaagtttgtgaggcgtctggtgacgtgtgggaacttattggaagcaacattttgctgtaaagcatcctatcgccagcggaacaacgcctggtaacaggtgcctctggggccaaaagccaaggtttaacagaccctttaggattggtttaaaacctgaaatgttgtggaaaatacttagtacctaccgacctggtagtaatgcaaacactagttgtaaggcccacgaaggatgcccagaaggtacccgtaggtaacaagtgacactatggatctgatctggggccaggtacttctatcctagtgacctggttaaaaaacgtctagtgggccaaacccgggggggatccccggtttccttttattttactaatgctatt

SEQ ID NO: 22548 - DNA, 559 bp, synthetic construct
  source 1..559: mol_type = other DNA
atgcctggtctccactggttgaaggcaacttgcaataaaatgagtggaaataagacgcttgaagcatggtgcaaatctacttttctaacccacactttgtgtggggtggcagatggcgtgccataattctattagtgagataccacgcttgtggaccttatgctcacacagccatcctctagtaagtttgtgaggcgtctggtgacgtgtgggaacttattggaagcaacattttgctgtaaagcatcctatcgccagcggaacaacgcctggtaacaggtgcctctggggccaaaagccaaggtttaacagaccctttaggattggtttaaaacctgaaatgttgtggaaaatacttagtacctaccgacctggtagtaatgcaaacactagttgtaaggcccacgaaggatgcccagaaggtacccgtaggtaacaagtgacactatggatctgatctggggccaggtacttctatcctagtgacctggttaaaaaacgtctagtgggccaaacccgggggggatccccggtttccttttattttactaatgctatt

SEQ ID NO: 22549 - DNA, 509 bp, synthetic construct
  source 1..509: mol_type = other DNA
taagacgcttgaagcatggtgcaaatctacttttctaacccacactttgtgtggggtggcagatggcgtgccataattctattagtgagataccacgcttgtggaccttatgctcacacagccatcctctagtaagtttgtgaggcgtctggtgacgtgtgggaacttattggaagcaacattttgctgtaaagcatcctatcgccagcggaacaacgcctggtaacaggtgcctctggggccaaaagccaaggtttaacagaccctttaggattggtttaaaacctgaaatgttgtggaaaatacttagtacctaccgacctggtagtaatgcaaacactagttgtaaggcccacgaaggatgcccagaaggtacccgtaggtaacaagtgacactatggatctgatctggggccaggtacttctatcctagtgacctggttaaaaaacgtctagtgggccaaacccgggggggatccccggtttccttttattttactaatgctatt

SEQ ID NO: 22550 - DNA, 659 bp, synthetic construct
  source 1..659: mol_type = other DNA
gctgagcttctataggaaaaaaccctttcccagccttggggtggctggtcaataaaaacccccatagtaaccaacacctaagacaatttgatcaaccctatgcctggtccccactattcgaaggcaacttgcaataagaagagtggaacaaggatgcttaaagcatagtgtaaatgatcttttctaacctgtattatgtacagggtggcagatggcgtgccataaatctattagtgggataccacgcttgtggaccttatgcccacacagccatcctctagtaagtttgtaaaatgtctggtgagatgtgggaacttattggaaacaacaatttgcttaatagcatcctagtgccagcggaacaacatctggtaacagatgcctctggggccaaaagccaaggtttgacagacccattaggattggtttcaaaacctgaattgttgtggaagatattcagtacctatcaatctggtagtggtgcaaacactagttgtaaggcccacgaaggatgcccagaaggtacccgcaggtaacaagagacactgtggatctgatctggggccaactacctctatcaggtgagttagttaaaaaacgtctagtgggccaaacccaggggggatccctggtttccttttattgttaatattgacatt

SEQ ID NO: 22551 - DNA, 609 bp, synthetic construct
  source 1..609: mol_type = other DNA
aataaaaacccccatagtaaccaacacctaagacaatttgatcaaccctatgcctggtccccactattcgaaggcaacttgcaataagaagagtggaacaaggatgcttaaagcatagtgtaaatgatcttttctaacctgtattatgtacagggtggcagatggcgtgccataaatctattagtgggataccacgcttgtggaccttatgcccacacagccatcctctagtaagtttgtaaaatgtctggtgagatgtgggaacttattggaaacaacaatttgcttaatagcatcctagtgccagcggaacaacatctggtaacagatgcctctggggccaaaagccaaggtttgacagacccattaggattggtttcaaaacctgaattgttgtggaagatattcagtacctatcaatctggtagtggtgcaaacactagttgtaaggcccacgaaggatgcccagaaggtacccgcaggtaacaagagacactgtggatctgatctggggccaactacctctatcaggtgagttagttaaaaaacgtctagtgggccaaacccaggggggatccctggtttccttttattgttaatattgacatt

SEQ ID NO: 22552 - DNA, 559 bp, synthetic construct
  source 1..559: mol_type = other DNA
tgcctggtccccactattcgaaggcaacttgcaataagaagagtggaacaaggatgcttaaagcatagtgtaaatgatcttttctaacctgtattatgtacagggtggcagatggcgtgccataaatctattagtgggataccacgcttgtggaccttatgcccacacagccatcctctagtaagtttgtaaaatgtctggtgagatgtgggaacttattggaaacaacaatttgcttaatagcatcctagtgccagcggaacaacatctggtaacagatgcctctggggccaaaagccaaggtttgacagacccattaggattggtttcaaaacctgaattgttgtggaagatattcagtacctatcaatctggtagtggtgcaaacactagttgtaaggcccacgaaggatgcccagaaggtacccgcaggtaacaagagacactgtggatctgatctggggccaactacctctatcaggtgagttagttaaaaaacgtctagtgggccaaacccaggggggatccctggtttccttttattgttaatattgacatt

SEQ ID NO: 22553 - DNA, 509 bp, synthetic construct
  source 1..509: mol_type = other DNA
aggatgcttaaagcatagtgtaaatgatcttttctaacctgtattatgtacagggtggcagatggcgtgccataaatctattagtgggataccacgcttgtggaccttatgcccacacagccatcctctagtaagtttgtaaaatgtctggtgagatgtgggaacttattggaaacaacaatttgcttaatagcatcctagtgccagcggaacaacatctggtaacagatgcctctggggccaaaagccaaggtttgacagacccattaggattggtttcaaaacctgaattgttgtggaagatattcagtacctatcaatctggtagtggtgcaaacactagttgtaaggcccacgaaggatgcccagaaggtacccgcaggtaacaagagacactgtggatctgatctggggccaactacctctatcaggtgagttagttaaaaaacgtctagtgggccaaacccaggggggatccctggtttccttttattgttaatattgacatt

SEQ ID NO: 22554 - DNA, 693 bp, synthetic construct
  source 1..693: mol_type = other DNA
gtacaccggtatcacggtacccttgtacgcctgttttatactccctaccccgtaacttagaagcaataatccaagttcaatagtaggggtacaaaccagtaccaccacgaacaagcacttctgtttccccggtgatatcgtatagactgtacccacggtcgaaaatggtggatccgttatccgcttttgtacttcgagaagcccagtaccatcttggaatcttcgatgcgttgcgctcagcactcgaacccggagtgtagcttaggccgatgagtctggacaatccccaccggcgacggtggtccaggctgcgttggcggcctacctgtggcccaaagccacaggacgctagttgtgaacaaggtgcgaagagcctattgagctacaaaagagtcctccggcccctgaatgcggctaatcccaaccatggagcaggtgatcacaaaccagtggtaagcctgtcgtaacgcgcaagtccgtggcggaaccgactactttgggtgtccgtgtttccttttatttttgtatggctgcttatggtgacaatcaaagattgttatcataaagcgaattggattggccatccagtgagagtaaagcacattatttacttgcttgttgggtttgcccctttgatttgtaacactctttatctaccttatattgtacttttggttagacaacagtatcacg

SEQ ID NO: 22555 - DNA, 643 bp, synthetic construct
  source 1..643: mol_type = other DNA
cgtaacttagaagcaataatccaagttcaatagtaggggtacaaaccagtaccaccacgaacaagcacttctgtttccccggtgatatcgtatagactgtacccacggtcgaaaatggtggatccgttatccgcttttgtacttcgagaagcccagtaccatcttggaatcttcgatgcgttgcgctcagcactcgaacccggagtgtagcttaggccgatgagtctggacaatccccaccggcgacggtggtccaggctgcgttggcggcctacctgtggcccaaagccacaggacgctagttgtgaacaaggtgcgaagagcctattgagctacaaaagagtcctccggcccctgaatgcggctaatcccaaccatggagcaggtgatcacaaaccagtggtaagcctgtcgtaacgcgcaagtccgtggcggaaccgactactttgggtgtccgtgtttccttttatttttgtatggctgcttatggtgacaatcaaagattgttatcataaagcgaattggattggccatccagtgagagtaaagcacattatttacttgcttgttgggtttgcccctttgatttgtaacactctttatctaccttatattgtacttttggttagacaacagtatcacg

SEQ ID NO: 22556 - DNA, 593 bp, synthetic construct
  source 1..593: mol_type = other DNA
accaccacgaacaagcacttctgtttccccggtgatatcgtatagactgtacccacggtcgaaaatggtggatccgttatccgcttttgtacttcgagaagcccagtaccatcttggaatcttcgatgcgttgcgctcagcactcgaacccggagtgtagcttaggccgatgagtctggacaatccccaccggcgacggtggtccaggctgcgttggcggcctacctgtggcccaaagccacaggacgctagttgtgaacaaggtgcgaagagcctattgagctacaaaagagtcctccggcccctgaatgcggctaatcccaaccatggagcaggtgatcacaaaccagtggtaagcctgtcgtaacgcgcaagtccgtggcggaaccgactactttgggtgtccgtgtttccttttatttttgtatggctgcttatggtgacaatcaaagattgttatcataaagcgaattggattggccatccagtgagagtaaagcacattatttacttgcttgttgggtttgcccctttgatttgtaacactctttatctaccttatattgtacttttggttagacaacagtatcacg

SEQ ID NO: 22557 - DNA, 543 bp, synthetic construct
  source 1..543: mol_type = other DNA
acccacggtcgaaaatggtggatccgttatccgcttttgtacttcgagaagcccagtaccatcttggaatcttcgatgcgttgcgctcagcactcgaacccggagtgtagcttaggccgatgagtctggacaatccccaccggcgacggtggtccaggctgcgttggcggcctacctgtggcccaaagccacaggacgctagttgtgaacaaggtgcgaagagcctattgagctacaaaagagtcctccggcccctgaatgcggctaatcccaaccatggagcaggtgatcacaaaccagtggtaagcctgtcgtaacgcgcaagtccgtggcggaaccgactactttgggtgtccgtgtttccttttatttttgtatggctgcttatggtgacaatcaaagattgttatcataaagcgaattggattggccatccagtgagagtaaagcacattatttacttgcttgttgggtttgcccctttgatttgtaacactctttatctaccttatattgtacttttggttagacaacagtatcacg

SEQ ID NO: 22558 - DNA, 693 bp, synthetic construct
  source 1..693: mol_type = other DNA
gtactccggtattgcggtacccttgtacgcctgttttatactcccttcccgtaacttagacgcacgacaccaagttcaatagaagggggtgcaaaccagtaccaccacgaacaagcacttctgtttccccggtgatgttgtatagactgcttgcgtggtcgaaagcgacggatccgttacccgcttatgtacttcgagaagcccagtaccacctcggaatcttcgacgcgttgcgctcagcactcaaccccagagtgtagcttaggctgatgagtctggacgtcccccaccggtgacggtggtccaggctgcgttggcggcctacctatggcttacgccatgggacgctagttgtgaacaaggtgtgaagagcctattgagctacataagaatcctccggcccctgaatgcggctaatcccaacctcggagcaggtggtcacaaaccagtgattggcctgtcgtaacgcgcaagtccgtggcggaaccgactactttgggtgtccgtgtttccttttattttattatggctgcttatggtgacaatcacagattgttatcataaagcgaattggattagccatccggtgaaagtgagactcattatctacctgttcgctggattcgctccattgagtgtgtttactctaagtacaatttcaacagttatttttaatcagacaattgtaccata

SEQ ID NO: 22559 - DNA, 643 bp, synthetic construct
  source 1..643: mol_type = other DNA
gtaacttagacgcacgacaccaagttcaatagaagggggtgcaaaccagtaccaccacgaacaagcacttctgtttccccggtgatgttgtatagactgcttgcgtggtcgaaagcgacggatccgttacccgcttatgtacttcgagaagcccagtaccacctcggaatcttcgacgcgttgcgctcagcactcaaccccagagtgtagcttaggctgatgagtctggacgtcccccaccggtgacggtggtccaggctgcgttggcggcctacctatggcttacgccatgggacgctagttgtgaacaaggtgtgaagagcctattgagctacataagaatcctccggcccctgaatgcggctaatcccaacctcggagcaggtggtcacaaaccagtgattggcctgtcgtaacgcgcaagtccgtggcggaaccgactactttgggtgtccgtgtttccttttattttattatggctgcttatggtgacaatcacagattgttatcataaagcgaattggattagccatccggtgaaagtgagactcattatctacctgttcgctggattcgctccattgagtgtgtttactctaagtacaatttcaacagttatttttaatcagacaattgtaccata

SEQ ID NO: 22560 - DNA, 593 bp, synthetic construct
  source 1..593: mol_type = other DNA
accaccacgaacaagcacttctgtttccccggtgatgttgtatagactgcttgcgtggtcgaaagcgacggatccgttacccgcttatgtacttcgagaagcccagtaccacctcggaatcttcgacgcgttgcgctcagcactcaaccccagagtgtagcttaggctgatgagtctggacgtcccccaccggtgacggtggtccaggctgcgttggcggcctacctatggcttacgccatgggacgctagttgtgaacaaggtgtgaagagcctattgagctacataagaatcctccggcccctgaatgcggctaatcccaacctcggagcaggtggtcacaaaccagtgattggcctgtcgtaacgcgcaagtccgtggcggaaccgactactttgggtgtccgtgtttccttttattttattatggctgcttatggtgacaatcacagattgttatcataaagcgaattggattagccatccggtgaaagtgagactcattatctacctgttcgctggattcgctccattgagtgtgtttactctaagtacaatttcaacagttatttttaatcagacaattgtaccata

SEQ ID NO: 22561 - DNA, 543 bp, synthetic construct
  source 1..543: mol_type = other DNA
ttgcgtggtcgaaagcgacggatccgttacccgcttatgtacttcgagaagcccagtaccacctcggaatcttcgacgcgttgcgctcagcactcaaccccagagtgtagcttaggctgatgagtctggacgtcccccaccggtgacggtggtccaggctgcgttggcggcctacctatggcttacgccatgggacgctagttgtgaacaaggtgtgaagagcctattgagctacataagaatcctccggcccctgaatgcggctaatcccaacctcggagcaggtggtcacaaaccagtgattggcctgtcgtaacgcgcaagtccgtggcggaaccgactactttgggtgtccgtgtttccttttattttattatggctgcttatggtgacaatcacagattgttatcataaagcgaattggattagccatccggtgaaagtgagactcattatctacctgttcgctggattcgctccattgagtgtgtttactctaagtacaatttcaacagttatttttaatcagacaattgtaccata

SEQ ID NO: 22562 - DNA, 694 bp, synthetic construct
  source 1..694: mol_type = other DNA
gtacaccggtatcacggtacccttgtacgcctgttttatactccctaccccgtaacttagaagcaacaatccaagttcaatagtaggggtacaaaccagtaccaccacgaacaagcacttctgtttccccggtgataccatatagactgtacccacggtcaaaaatggtggatccgttacccgcttttgtacttcgagaagcccagtatcatcttggaatcttcgatgcgttgcgttcagcactcgaacccggagtgtagcttaggtcgatgagtctggacaatcctcaccggcgacggtggtccaggctgcgttggcggcctacctgtggcccaaagccacaggacgctagttgtgaacaaggtgtgaagagcctattgagctacaaaagagtcctccggcccctgaatgcggctaatcccaaccatggagcaggtggtcacaaaccagtgactagcctgtcgtaacgcgcaagtccgtggcggaaccgactactttgggtgtccgtgtttccttttattttatgtatggctgcttatggtgacaatcaaagattgttatcataaagcaaattggattggccatccagtgagagtaaaacacattatctacttatttgttggatttgtccctttaattcatcacactcttcatctaatttacattgtggttctaattagacagcagtatcaca

SEQ ID NO: 22563 - DNA, 644 bp, synthetic construct
  source 1..644: mol_type = other DNA
cgtaacttagaagcaacaatccaagttcaatagtaggggtacaaaccagtaccaccacgaacaagcacttctgtttccccggtgataccatatagactgtacccacggtcaaaaatggtggatccgttacccgcttttgtacttcgagaagcccagtatcatcttggaatcttcgatgcgttgcgttcagcactcgaacccggagtgtagcttaggtcgatgagtctggacaatcctcaccggcgacggtggtccaggctgcgttggcggcctacctgtggcccaaagccacaggacgctagttgtgaacaaggtgtgaagagcctattgagctacaaaagagtcctccggcccctgaatgcggctaatcccaaccatggagcaggtggtcacaaaccagtgactagcctgtcgtaacgcgcaagtccgtggcggaaccgactactttgggtgtccgtgtttccttttattttatgtatggctgcttatggtgacaatcaaagattgttatcataaagcaaattggattggccatccagtgagagtaaaacacattatctacttatttgttggatttgtccctttaattcatcacactcttcatctaatttacattgtggttctaattagacagcagtatcaca

SEQ ID NO: 22564 - DNA, 594 bp, synthetic construct
  source 1..594: mol_type = other DNA
accaccacgaacaagcacttctgtttccccggtgataccatatagactgtacccacggtcaaaaatggtggatccgttacccgcttttgtacttcgagaagcccagtatcatcttggaatcttcgatgcgttgcgttcagcactcgaacccggagtgtagcttaggtcgatgagtctggacaatcctcaccggcgacggtggtccaggctgcgttggcggcctacctgtggcccaaagccacaggacgctagttgtgaacaaggtgtgaagagcctattgagctacaaaagagtcctccggcccctgaatgcggctaatcccaaccatggagcaggtggtcacaaaccagtgactagcctgtcgtaacgcgcaagtccgtggcggaaccgactactttgggtgtccgtgtttccttttattttatgtatggctgcttatggtgacaatcaaagattgttatcataaagcaaattggattggccatccagtgagagtaaaacacattatctacttatttgttggatttgtccctttaattcatcacactcttcatctaatttacattgtggttctaattagacagcagtatcaca

SEQ ID NO: 22565 - DNA, 544 bp, synthetic construct
  source 1..544: mol_type = other DNA
acccacggtcaaaaatggtggatccgttacccgcttttgtacttcgagaagcccagtatcatcttggaatcttcgatgcgttgcgttcagcactcgaacccggagtgtagcttaggtcgatgagtctggacaatcctcaccggcgacggtggtccaggctgcgttggcggcctacctgtggcccaaagccacaggacgctagttgtgaacaaggtgtgaagagcctattgagctacaaaagagtcctccggcccctgaatgcggctaatcccaaccatggagcaggtggtcacaaaccagtgactagcctgtcgtaacgcgcaagtccgtggcggaaccgactactttgggtgtccgtgtttccttttattttatgtatggctgcttatggtgacaatcaaagattgttatcataaagcaaattggattggccatccagtgagagtaaaacacattatctacttatttgttggatttgtccctttaattcatcacactcttcatctaatttacattgtggttctaattagacagcagtatcaca

SEQ ID NO: 22566 - DNA, 694 bp, synthetic construct
  source 1..694: mol_type = other DNA
gtactccggtattacggtacccttgtacgcctgttttatactccctccctcgtaacttagaagcacaaaaccaagttcaatagaagggggtgcaaaccagtaccaccacgaacaagcatttctgtttccccggtgatgttgtatagactgcccgcgcggttgaaagcaacggatccgttacccgctcaagtacttcgagaagcctagtattaccttggaatcttcgatgcgttgcgttcagcactcgaccctggagtgtagcttaggctgatgagtctggacgtccctcaccggtgacggtggtccaggctgcgttggcggcctacctatggctaacgccataggacgctagttgtgaacaaggtgtgaagagcctattgagctacttgagagtcctccggcccctgaatgcggctaatcctaaccatggagcaggcggtcacagaccagtgactagcttgtcgtaatgcgcaagtctatggcggaaccgactactttgggtgtccgtgtttccttttatttttattatggctgcttatggtgacaatcattgattgttatcataaagcgaattggattggccatccggtgaaagcgagacttactatttacttacttgttggacttaccacacttaatacatttattctaggtgtcacttgtatagcaattagaatcaaacagttgcatcata

SEQ ID NO: 22567 - DNA, 644 bp, synthetic construct
  source 1..644: mol_type = other DNA
cgtaacttagaagcacaaaaccaagttcaatagaagggggtgcaaaccagtaccaccacgaacaagcatttctgtttccccggtgatgttgtatagactgcccgcgcggttgaaagcaacggatccgttacccgctcaagtacttcgagaagcctagtattaccttggaatcttcgatgcgttgcgttcagcactcgaccctggagtgtagcttaggctgatgagtctggacgtccctcaccggtgacggtggtccaggctgcgttggcggcctacctatggctaacgccataggacgctagttgtgaacaaggtgtgaagagcctattgagctacttgagagtcctccggcccctgaatgcggctaatcctaaccatggagcaggcggtcacagaccagtgactagcttgtcgtaatgcgcaagtctatggcggaaccgactactttgggtgtccgtgtttccttttatttttattatggctgcttatggtgacaatcattgattgttatcataaagcgaattggattggccatccggtgaaagcgagacttactatttacttacttgttggacttaccacacttaatacatttattctaggtgtcacttgtatagcaattagaatcaaacagttgcatcata

SEQ ID NO: 22568 - DNA, 594 bp, synthetic construct
  source 1..594: mol_type = other DNA
taccaccacgaacaagcatttctgtttccccggtgatgttgtatagactgcccgcgcggttgaaagcaacggatccgttacccgctcaagtacttcgagaagcctagtattaccttggaatcttcgatgcgttgcgttcagcactcgaccctggagtgtagcttaggctgatgagtctggacgtccctcaccggtgacggtggtccaggctgcgttggcggcctacctatggctaacgccataggacgctagttgtgaacaaggtgtgaagagcctattgagctacttgagagtcctccggcccctgaatgcggctaatcctaaccatggagcaggcggtcacagaccagtgactagcttgtcgtaatgcgcaagtctatggcggaaccgactactttgggtgtccgtgtttccttttatttttattatggctgcttatggtgacaatcattgattgttatcataaagcgaattggattggccatccggtgaaagcgagacttactatttacttacttgttggacttaccacacttaatacatttattctaggtgtcacttgtatagcaattagaatcaaacagttgcatcata

SEQ ID NO: 22569 - DNA, 544 bp, synthetic construct
  source 1..544: mol_type = other DNA
cccgcgcggttgaaagcaacggatccgttacccgctcaagtacttcgagaagcctagtattaccttggaatcttcgatgcgttgcgttcagcactcgaccctggagtgtagcttaggctgatgagtctggacgtccctcaccggtgacggtggtccaggctgcgttggcggcctacctatggctaacgccataggacgctagttgtgaacaaggtgtgaagagcctattgagctacttgagagtcctccggcccctgaatgcggctaatcctaaccatggagcaggcggtcacagaccagtgactagcttgtcgtaatgcgcaagtctatggcggaaccgactactttgggtgtccgtgtttccttttatttttattatggctgcttatggtgacaatcattgattgttatcataaagcgaattggattggccatccggtgaaagcgagacttactatttacttacttgttggacttaccacacttaatacatttattctaggtgtcacttgtatagcaattagaatcaaacagttgcatcata

SEQ ID NO: 22570 - DNA, 696 bp, synthetic construct
  source 1..696: mol_type = other DNA
gtacaccggtattacggtacccttgtacgcctgttttatactccctaccccgtaacttagaagcaataacttaagttcaatagtagggggtacaaaccagtaccaccacgaacaagcacttctgtttccccggtgacattgtatagactgtgcccacggttgaaaacgatggatccgttatccgctcttgtacttcgagaagcctagtaatactttggaatcttcgatgcgttgcgctcagcactcatccccagagtgtagcttaggccgatgagtctggacattcctcaccggcgacggtggtccaggctgcgttggcggcctacctgtggcccaaagccacaggacgctagttgtgaacaaggtgtgaagagcctattgagctacaagagagtcctccggcccctgaatgcggctaatcccaaccatggagcaggtgatcgcaaaccagcggttagcctgtcgtaacgcgcaagtctgtggcggaaccgactactttgggagtccgtgtttctctttatttttacttatggctgcttatggtgacaatcatagattgttatcataacgcgaattggattggccatccggtgatatacaaacacattgtttacctatttattgggtttacacctttaagttctttcactctacaccttactcgtgttgtgttattaaccagacagtggtgccaac

SEQ ID NO: 22571 - DNA, 646 bp, synthetic construct
  source 1..646: mol_type = other DNA
cgtaacttagaagcaataacttaagttcaatagtagggggtacaaaccagtaccaccacgaacaagcacttctgtttccccggtgacattgtatagactgtgcccacggttgaaaacgatggatccgttatccgctcttgtacttcgagaagcctagtaatactttggaatcttcgatgcgttgcgctcagcactcatccccagagtgtagcttaggccgatgagtctggacattcctcaccggcgacggtggtccaggctgcgttggcggcctacctgtggcccaaagccacaggacgctagttgtgaacaaggtgtgaagagcctattgagctacaagagagtcctccggcccctgaatgcggctaatcccaaccatggagcaggtgatcgcaaaccagcggttagcctgtcgtaacgcgcaagtctgtggcggaaccgactactttgggagtccgtgtttctctttatttttacttatggctgcttatggtgacaatcatagattgttatcataacgcgaattggattggccatccggtgatatacaaacacattgtttacctatttattgggtttacacctttaagttctttcactctacaccttactcgtgttgtgttattaaccagacagtggtgccaac

SEQ ID NO: 22572 - DNA, 596 bp, synthetic construct
  source 1..596: mol_type = other DNA
taccaccacgaacaagcacttctgtttccccggtgacattgtatagactgtgcccacggttgaaaacgatggatccgttatccgctcttgtacttcgagaagcctagtaatactttggaatcttcgatgcgttgcgctcagcactcatccccagagtgtagcttaggccgatgagtctggacattcctcaccggcgacggtggtccaggctgcgttggcggcctacctgtggcccaaagccacaggacgctagttgtgaacaaggtgtgaagagcctattgagctacaagagagtcctccggcccctgaatgcggctaatcccaaccatggagcaggtgatcgcaaaccagcggttagcctgtcgtaacgcgcaagtctgtggcggaaccgactactttgggagtccgtgtttctctttatttttacttatggctgcttatggtgacaatcatagattgttatcataacgcgaattggattggccatccggtgatatacaaacacattgtttacctatttattgggtttacacctttaagttctttcactctacaccttactcgtgttgtgttattaaccagacagtggtgccaac

SEQ ID NO: 22573 - DNA, 546 bp, synthetic construct
  source 1..546: mol_type = other DNA
tgcccacggttgaaaacgatggatccgttatccgctcttgtacttcgagaagcctagtaatactttggaatcttcgatgcgttgcgctcagcactcatccccagagtgtagcttaggccgatgagtctggacattcctcaccggcgacggtggtccaggctgcgttggcggcctacctgtggcccaaagccacaggacgctagttgtgaacaaggtgtgaagagcctattgagctacaagagagtcctccggcccctgaatgcggctaatcccaaccatggagcaggtgatcgcaaaccagcggttagcctgtcgtaacgcgcaagtctgtggcggaaccgactactttgggagtccgtgtttctctttatttttacttatggctgcttatggtgacaatcatagattgttatcataacgcgaattggattggccatccggtgatatacaaacacattgtttacctatttattgggtttacacctttaagttctttcactctacaccttactcgtgttgtgttattaaccagacagtggtgccaac

SEQ ID NO: 22574 - DNA, 698 bp, synthetic construct
  source 1..698: mol_type = other DNA
catgttatgacgtatctttcatctaccccaacccttgtgtcaaccgatacgcctacacaggtgggtaaagcaccggcccactgaatggaacaaaatgctaggtgcaaagtcaggcccataggccatcggtcgaagcccgcttgggaataagactgatggattaccctattctggcgcctgaccacttgtttcttttctgaatcacacacctgtgtgaacggtggacctgcaccgtaactcttctagcctactaccacacttgtggaactataggggcacaggaacttcaaccaagtgctgttggaatggagaaaataatccaatcctgaaacgtcatggatccacactctgtgtggggctactagcctgcggaacaacacatggtaacatgtgccccaggggccgaaagccacggtgataagatcaccctagtagtttgagattgtatcaatgttcatgtcttagtaaggggaggtgaaatctatctgtgacaccggattactggttgtcgtatagcggctgaaggatgtcctgctggtacctttagggaaccttaagagactattgatcgaagcaggagcctggttggtctctcccactccaggttaaaaaacgtctaggccgtggaaccgggcgggaggcccggttttcctcccaaaattataatattgtgtatggtgacaactgaaggcttaaca

SEQ ID NO: 22575 - DNA, 648 bp, synthetic construct
  source 1..648: mol_type = other DNA
gcctacacaggtgggtaaagcaccggcccactgaatggaacaaaatgctaggtgcaaagtcaggcccataggccatcggtcgaagcccgcttgggaataagactgatggattaccctattctggcgcctgaccacttgtttcttttctgaatcacacacctgtgtgaacggtggacctgcaccgtaactcttctagcctactaccacacttgtggaactataggggcacaggaacttcaaccaagtgctgttggaatggagaaaataatccaatcctgaaacgtcatggatccacactctgtgtggggctactagcctgcggaacaacacatggtaacatgtgccccaggggccgaaagccacggtgataagatcaccctagtagtttgagattgtatcaatgttcatgtcttagtaaggggaggtgaaatctatctgtgacaccggattactggttgtcgtatagcggctgaaggatgtcctgctggtacctttagggaaccttaagagactattgatcgaagcaggagcctggttggtctctcccactccaggttaaaaaacgtctaggccgtggaaccgggcgggaggcccggttttcctcccaaaattataatattgtgtatggtgacaactgaaggcttaaca

SEQ ID NO: 22576 - DNA, 598 bp, synthetic construct
  source 1..598: mol_type = other DNA
ggtgcaaagtcaggcccataggccatcggtcgaagcccgcttgggaataagactgatggattaccctattctggcgcctgaccacttgtttcttttctgaatcacacacctgtgtgaacggtggacctgcaccgtaactcttctagcctactaccacacttgtggaactataggggcacaggaacttcaaccaagtgctgttggaatggagaaaataatccaatcctgaaacgtcatggatccacactctgtgtggggctactagcctgcggaacaacacatggtaacatgtgccccaggggccgaaagccacggtgataagatcaccctagtagtttgagattgtatcaatgttcatgtcttagtaaggggaggtgaaatctatctgtgacaccggattactggttgtcgtatagcggctgaaggatgtcctgctggtacctttagggaaccttaagagactattgatcgaagcaggagcctggttggtctctcccactccaggttaaaaaacgtctaggccgtggaaccgggcgggaggcccggttttcctcccaaaattataatattgtgtatggtgacaactgaaggcttaaca

SEQ ID NO: 22577 - DNA, 548 bp, synthetic construct
  source 1..548: mol_type = other DNA
gactgatggattaccctattctggcgcctgaccacttgtttcttttctgaatcacacacctgtgtgaacggtggacctgcaccgtaactcttctagcctactaccacacttgtggaactataggggcacaggaacttcaaccaagtgctgttggaatggagaaaataatccaatcctgaaacgtcatggatccacactctgtgtggggctactagcctgcggaacaacacatggtaacatgtgccccaggggccgaaagccacggtgataagatcaccctagtagtttgagattgtatcaatgttcatgtcttagtaaggggaggtgaaatctatctgtgacaccggattactggttgtcgtatagcggctgaaggatgtcctgctggtacctttagggaaccttaagagactattgatcgaagcaggagcctggttggtctctcccactccaggttaaaaaacgtctaggccgtggaaccgggcgggaggcccggttttcctcccaaaattataatattgtgtatggtgacaactgaaggcttaaca

SEQ ID NO: 22578 - DNA, 701 bp, synthetic construct
  source 1..701: mol_type = other DNA
gctagtacactggtattacggtacccttgtacgcctgttttacacccctttcccccgtaacttagaagcttttaaattcaagttcaacagtgagtggtacaacccagtactactatgaacaagcacttctgttaccccggtgagattgcataagctgtccccacggctaaaagcgattgatccgttatccgctcttgtacttcgagaagcccagtaaaaccttgggatcctcgatgcgttgcgctcaacactcaaccccagagtgtagcttgggctgatgagtctgggcattcctcaccggcgacggtggtccaggctgcgttggcggcctacctgtggcccaaagccacaggacgctagttgtgaacaaggtgtgaagagcctattgagctacaagagagtcctccggcccctgaatgcggctaatcccaaccacggagcaggtgattgcaacccagcaactagcctgtcgtaacgcgcaagtctgtggcggaaccgactactttgggtgtccgtgtttccttttattacataatggctgcttatggtgacaatcatagattgttgtcataaagcgagttggattggccatccggtgagaattaaaacaattatttacttgtttgttggatttgttcctatacacacccatacaccttgcttgattgaagtaattctgttgataagacaacactattacg

SEQ ID NO: 22579 - DNA, 651 bp, synthetic construct
  source 1..651: mol_type = other DNA
tcccccgtaacttagaagcttttaaattcaagttcaacagtgagtggtacaacccagtactactatgaacaagcacttctgttaccccggtgagattgcataagctgtccccacggctaaaagcgattgatccgttatccgctcttgtacttcgagaagcccagtaaaaccttgggatcctcgatgcgttgcgctcaacactcaaccccagagtgtagcttgggctgatgagtctgggcattcctcaccggcgacggtggtccaggctgcgttggcggcctacctgtggcccaaagccacaggacgctagttgtgaacaaggtgtgaagagcctattgagctacaagagagtcctccggcccctgaatgcggctaatcccaaccacggagcaggtgattgcaacccagcaactagcctgtcgtaacgcgcaagtctgtggcggaaccgactactttgggtgtccgtgtttccttttattacataatggctgcttatggtgacaatcatagattgttgtcataaagcgagttggattggccatccggtgagaattaaaacaattatttacttgtttgttggatttgttcctatacacacccatacaccttgcttgattgaagtaattctgttgataagacaacactattacg

SEQ ID NO: 22580 - DNA, 601 bp, synthetic construct
  source 1..601: mol_type = other DNA
aacccagtactactatgaacaagcacttctgttaccccggtgagattgcataagctgtccccacggctaaaagcgattgatccgttatccgctcttgtacttcgagaagcccagtaaaaccttgggatcctcgatgcgttgcgctcaacactcaaccccagagtgtagcttgggctgatgagtctgggcattcctcaccggcgacggtggtccaggctgcgttggcggcctacctgtggcccaaagccacaggacgctagttgtgaacaaggtgtgaagagcctattgagctacaagagagtcctccggcccctgaatgcggctaatcccaaccacggagcaggtgattgcaacccagcaactagcctgtcgtaacgcgcaagtctgtggcggaaccgactactttgggtgtccgtgtttccttttattacataatggctgcttatggtgacaatcatagattgttgtcataaagcgagttggattggccatccggtgagaattaaaacaattatttacttgtttgttggatttgttcctatacacacccatacaccttgcttgattgaagtaattctgttgataagacaacactattacg

SEQ ID NO: 22581 - DNA, 551 bp, synthetic construct
  source 1..551: mol_type = other DNA
taagctgtccccacggctaaaagcgattgatccgttatccgctcttgtacttcgagaagcccagtaaaaccttgggatcctcgatgcgttgcgctcaacactcaaccccagagtgtagcttgggctgatgagtctgggcattcctcaccggcgacggtggtccaggctgcgttggcggcctacctgtggcccaaagccacaggacgctagttgtgaacaaggtgtgaagagcctattgagctacaagagagtcctccggcccctgaatgcggctaatcccaaccacggagcaggtgattgcaacccagcaactagcctgtcgtaacgcgcaagtctgtggcggaaccgactactttgggtgtccgtgtttccttttattacataatggctgcttatggtgacaatcatagattgttgtcataaagcgagttggattggccatccggtgagaattaaaacaattatttacttgtttgttggatttgttcctatacacacccatacaccttgcttgattgaagtaattctgttgataagacaacactattacg

SEQ ID NO: 22582 - DNA, 501 bp, synthetic construct
  source 1..501: mol_type = other DNA
ttcgagaagcccagtaaaaccttgggatcctcgatgcgttgcgctcaacactcaaccccagagtgtagcttgggctgatgagtctgggcattcctcaccggcgacggtggtccaggctgcgttggcggcctacctgtggcccaaagccacaggacgctagttgtgaacaaggtgtgaagagcctattgagctacaagagagtcctccggcccctgaatgcggctaatcccaaccacggagcaggtgattgcaacccagcaactagcctgtcgtaacgcgcaagtctgtggcggaaccgactactttgggtgtccgtgtttccttttattacataatggctgcttatggtgacaatcatagattgttgtcataaagcgagttggattggccatccggtgagaattaaaacaattatttacttgtttgttggatttgttcctatacacacccatacaccttgcttgattgaagtaattctgttgataagacaacactattacg

SEQ ID NO: 22583 - DNA, 950 bp, synthetic construct
  source 1..950: mol_type = other DNA
gtgtcagatgcttttacaaactttatgctatggcgcgctggagtggcagtccacatttccacgtcggccagccccgctatggcaggagcgctactcgtggtggcatcacccgagggctttgaggacgtgcaacagcgcccatggaatgcgcaagttagcgggctaactacaatcccatatgtacttcttaacctgtgccaatccaattcagccactgtaatcctccctccttgtacagtcactccgtttgatgatgcccgctcccatacatcttggtctgtgcgcgtgtatgtcttcacacagctaaatgtccctaccggcgttgcaaatcaaatcacaattcaattgatgtttgctccccttgcttcccggtttttgtttgcatgtgttcccataaagcaccacctgcgcacccgcatactacccggttccggggatggctattcatttaacatcccccagaaccagggcgtccctatggctcaatatcttcctgaacatgagtccgcagactacatccctgggcattttgataattttgcacggtttgctaacgcccccgggctcttgcgcactgtgcgttggctctctgagtatactcccaacacacctcttcttcggcttaatttgaattctattagtctcggtcccgatacccacacccccttatcctatgtacttagtgcttttgctcaacaacgtgggtctctctcttttgatttggtgtttgttggggcccaggtccaatctgggcgcctgctcatatctataacccccccctcgcaggcccctcctgccagtgtcgaggaagccctccgtggccattccctgacctgggacgtgactgtgtcttgctgcagctcatttcacgcccccttcttctctgcgactgcctggcgatctctagctattgatggatccgctacaaaaactctctacaattcgtgggg

SEQ ID NO: 22584 - DNA, 900 bp, synthetic construct
  source 1..900: mol_type = other DNA
ccacatttccacgtcggccagccccgctatggcaggagcgctactcgtggtggcatcacccgagggctttgaggacgtgcaacagcgcccatggaatgcgcaagttagcgggctaactacaatcccatatgtacttcttaacctgtgccaatccaattcagccactgtaatcctccctccttgtacagtcactccgtttgatgatgcccgctcccatacatcttggtctgtgcgcgtgtatgtcttcacacagctaaatgtccctaccggcgttgcaaatcaaatcacaattcaattgatgtttgctccccttgcttcccggtttttgtttgcatgtgttcccataaagcaccacctgcgcacccgcatactacccggttccggggatggctattcatttaacatcccccagaaccagggcgtccctatggctcaatatcttcctgaacatgagtccgcagactacatccctgggcattttgataattttgcacggtttgctaacgcccccgggctcttgcgcactgtgcgttggctctctgagtatactcccaacacacctcttcttcggcttaatttgaattctattagtctcggtcccgatacccacacccccttatcctatgtacttagtgcttttgctcaacaacgtgggtctctctcttttgatttggtgtttgttggggcccaggtccaatctgggcgcctgctcatatctataacccccccctcgcaggcccctcctgccagtgtcgaggaagccctccgtggccattccctgacctgggacgtgactgtgtcttgctgcagctcatttcacgcccccttcttctctgcgactgcctggcgatctctagctattgatggatccgctacaaaaactctctacaattcgtgggg

SEQ ID NO: 22585 - DNA, 850 bp, synthetic construct
  source 1..850: mol_type = other DNA
tggcatcacccgagggctttgaggacgtgcaacagcgcccatggaatgcgcaagttagcgggctaactacaatcccatatgtacttcttaacctgtgccaatccaattcagccactgtaatcctccctccttgtacagtcactccgtttgatgatgcccgctcccatacatcttggtctgtgcgcgtgtatgtcttcacacagctaaatgtccctaccggcgttgcaaatcaaatcacaattcaattgatgtttgctccccttgcttcccggtttttgtttgcatgtgttcccataaagcaccacctgcgcacccgcatactacccggttccggggatggctattcatttaacatcccccagaaccagggcgtccctatggctcaatatcttcctgaacatgagtccgcagactacatccctgggcattttgataattttgcacggtttgctaacgcccccgggctcttgcgcactgtgcgttggctctctgagtatactcccaacacacctcttcttcggcttaatttgaattctattagtctcggtcccgatacccacacccccttatcctatgtacttagtgcttttgctcaacaacgtgggtctctctcttttgatttggtgtttgttggggcccaggtccaatctgggcgcctgctcatatctataacccccccctcgcaggcccctcctgccagtgtcgaggaagccctccgtggccattccctgacctgggacgtgactgtgtcttgctgcagctcatttcacgcccccttcttctctgcgactgcctggcgatctctagctattgatggatccgctacaaaaactctctacaattcgtgggg

SEQ ID NO: 22586 - DNA, 800 bp, synthetic construct
  source 1..800: mol_type = other DNA
caagttagcgggctaactacaatcccatatgtacttcttaacctgtgccaatccaattcagccactgtaatcctccctccttgtacagtcactccgtttgatgatgcccgctcccatacatcttggtctgtgcgcgtgtatgtcttcacacagctaaatgtccctaccggcgttgcaaatcaaatcacaattcaattgatgtttgctccccttgcttcccggtttttgtttgcatgtgttcccataaagcaccacctgcgcacccgcatactacccggttccggggatggctattcatttaacatcccccagaaccagggcgtccctatggctcaatatcttcctgaacatgagtccgcagactacatccctgggcattttgataattttgcacggtttgctaacgcccccgggctcttgcgcactgtgcgttggctctctgagtatactcccaacacacctcttcttcggcttaatttgaattctattagtctcggtcccgatacccacacccccttatcctatgtacttagtgcttttgctcaacaacgtgggtctctctcttttgatttggtgtttgttggggcccaggtccaatctgggcgcctgctcatatctataacccccccctcgcaggcccctcctgccagtgtcgaggaagccctccgtggccattccctgacctgggacgtgactgtgtcttgctgcagctcatttcacgcccccttcttctctgcgactgcctggcgatctctagctattgatggatccgctacaaaaactctctacaattcgtgggg

SEQ ID NO: 22587 - DNA, 750 bp, synthetic construct
  source 1..750: mol_type = other DNA
atccaattcagccactgtaatcctccctccttgtacagtcactccgtttgatgatgcccgctcccatacatcttggtctgtgcgcgtgtatgtcttcacacagctaaatgtccctaccggcgttgcaaatcaaatcacaattcaattgatgtttgctccccttgcttcccggtttttgtttgcatgtgttcccataaagcaccacctgcgcacccgcatactacccggttccggggatggctattcatttaacatcccccagaaccagggcgtccctatggctcaatatcttcctgaacatgagtccgcagactacatccctgggcattttgataattttgcacggtttgctaacgcccccgggctcttgcgcactgtgcgttggctctctgagtatactcccaacacacctcttcttcggcttaatttgaattctattagtctcggtcccgatacccacacccccttatcctatgtacttagtgcttttgctcaacaacgtgggtctctctcttttgatttggtgtttgttggggcccaggtccaatctgggcgcctgctcatatctataacccccccctcgcaggcccctcctgccagtgtcgaggaagccctccgtggccattccctgacctgggacgtgactgtgtcttgctgcagctcatttcacgcccccttcttctctgcgactgcctggcgatctctagctattgatggatccgctacaaaaactctctacaattcgtgggg

SEQ ID NO: 22588 - DNA, 700 bp, synthetic construct
  source 1..700: mol_type = other DNA
atgatgcccgctcccatacatcttggtctgtgcgcgtgtatgtcttcacacagctaaatgtccctaccggcgttgcaaatcaaatcacaattcaattgatgtttgctccccttgcttcccggtttttgtttgcatgtgttcccataaagcaccacctgcgcacccgcatactacccggttccggggatggctattcatttaacatcccccagaaccagggcgtccctatggctcaatatcttcctgaacatgagtccgcagactacatccctgggcattttgataattttgcacggtttgctaacgcccccgggctcttgcgcactgtgcgttggctctctgagtatactcccaacacacctcttcttcggcttaatttgaattctattagtctcggtcccgatacccacacccccttatcctatgtacttagtgcttttgctcaacaacgtgggtctctctcttttgatttggtgtttgttggggcccaggtccaatctgggcgcctgctcatatctataacccccccctcgcaggcccctcctgccagtgtcgaggaagccctccgtggccattccctgacctgggacgtgactgtgtcttgctgcagctcatttcacgcccccttcttctctgcgactgcctggcgatctctagctattgatggatccgctacaaaaactctctacaattcgtgggg

SEQ ID NO: 22589 - DNA, 650 bp, synthetic construct
  source 1..650: mol_type = other DNA
cagctaaatgtccctaccggcgttgcaaatcaaatcacaattcaattgatgtttgctccccttgcttcccggtttttgtttgcatgtgttcccataaagcaccacctgcgcacccgcatactacccggttccggggatggctattcatttaacatcccccagaaccagggcgtccctatggctcaatatcttcctgaacatgagtccgcagactacatccctgggcattttgataattttgcacggtttgctaacgcccccgggctcttgcgcactgtgcgttggctctctgagtatactcccaacacacctcttcttcggcttaatttgaattctattagtctcggtcccgatacccacacccccttatcctatgtacttagtgcttttgctcaacaacgtgggtctctctcttttgatttggtgtttgttggggcccaggtccaatctgggcgcctgctcatatctataacccccccctcgcaggcccctcctgccagtgtcgaggaagccctccgtggccattccctgacctgggacgtgactgtgtcttgctgcagctcatttcacgcccccttcttctctgcgactgcctggcgatctctagctattgatggatccgctacaaaaactctctacaattcgtgggg

SEQ ID NO: 22590 - DNA, 600 bp, synthetic construct
  source 1..600: mol_type = other DNA
gtttgctccccttgcttcccggtttttgtttgcatgtgttcccataaagcaccacctgcgcacccgcatactacccggttccggggatggctattcatttaacatcccccagaaccagggcgtccctatggctcaatatcttcctgaacatgagtccgcagactacatccctgggcattttgataattttgcacggtttgctaacgcccccgggctcttgcgcactgtgcgttggctctctgagtatactcccaacacacctcttcttcggcttaatttgaattctattagtctcggtcccgatacccacacccccttatcctatgtacttagtgcttttgctcaacaacgtgggtctctctcttttgatttggtgtttgttggggcccaggtccaatctgggcgcctgctcatatctataacccccccctcgcaggcccctcctgccagtgtcgaggaagccctccgtggccattccctgacctgggacgtgactgtgtcttgctgcagctcatttcacgcccccttcttctctgcgactgcctggcgatctctagctattgatggatccgctacaaaaactctctacaattcgtgggg

SEQ ID NO: 22591 - DNA, 550 bp, synthetic construct
  source 1..550: mol_type = other DNA
accacctgcgcacccgcatactacccggttccggggatggctattcatttaacatcccccagaaccagggcgtccctatggctcaatatcttcctgaacatgagtccgcagactacatccctgggcattttgataattttgcacggtttgctaacgcccccgggctcttgcgcactgtgcgttggctctctgagtatactcccaacacacctcttcttcggcttaatttgaattctattagtctcggtcccgatacccacacccccttatcctatgtacttagtgcttttgctcaacaacgtgggtctctctcttttgatttggtgtttgttggggcccaggtccaatctgggcgcctgctcatatctataacccccccctcgcaggcccctcctgccagtgtcgaggaagccctccgtggccattccctgacctgggacgtgactgtgtcttgctgcagctcatttcacgcccccttcttctctgcgactgcctggcgatctctagctattgatggatccgctacaaaaactctctacaattcgtgggg

SEQ ID NO: 22592 - DNA, 500 bp, synthetic construct
  source 1..500: mol_type = other DNA
aacatcccccagaaccagggcgtccctatggctcaatatcttcctgaacatgagtccgcagactacatccctgggcattttgataattttgcacggtttgctaacgcccccgggctcttgcgcactgtgcgttggctctctgagtatactcccaacacacctcttcttcggcttaatttgaattctattagtctcggtcccgatacccacacccccttatcctatgtacttagtgcttttgctcaacaacgtgggtctctctcttttgatttggtgtttgttggggcccaggtccaatctgggcgcctgctcatatctataacccccccctcgcaggcccctcctgccagtgtcgaggaagccctccgtggccattccctgacctgggacgtgactgtgtcttgctgcagctcatttcacgcccccttcttctctgcgactgcctggcgatctctagctattgatggatccgctacaaaaactctctacaattcgtgggg

SEQ ID NO: 22593 - DNA, 950 bp, synthetic construct
  source 1..950: mol_type = other DNA
gcctttcctacacccgactcccgaccctaacccagggtcctcggaagaggatcatacatctcatcccctgaatgctgactaatcagaggaaagttagcattttccggcccaggctaagagaagtagataagttagattcaaattgatacaacatccccttgacgaattcgcaacgaaaagtcgtccctcacttgccgcttgatcacacccacgaactcacaattcggcccctcgtgacaagccccttgttgaaacgacctctttcaatgcgacgtggttggagatttgtcatcttacgactccgacgtaactaccgtcatgcctccccgattatgtgatgctatccgccctgctgggtggagcattctcgggttgagtaacctacatcctttactccttggactccggtcccccggtctaagccgcttggaatatgacagggttattttccaaacatcttctttctactcttaagtgttctatacttaagaagggtatgtgttgccccttccttcttggagaacgtgcgcggcggtctttccgtctctcgaaaagcgtgcgtgcaacatgcagagacctgtgaagaaagcagtctttgaactagccttagtgcagacaagaaactggctgtagcgacctcacactagcagcggacacccctcctggtaacaggagcccctgcggccaaaagccacgtggataggatccactggtgtgagcggtgcatccccagcaccctggtttcttggttgtactctggtgaacccagagatggcaatcttaagcaactctgtagagaagccaagaatgtccggaaggtaccccgcttcggtgggatctgatccggagactcgtccacagtgctctacactgtggctcgggtttaaaaactgtcacagcttctccaaaccaagtggtcttggttttccctttttactcattgtgtcacg

SEQ ID NO: 22594 - DNA, 900 bp, synthetic construct
  source 1..900: mol_type = other DNA
atcatacatctcatcccctgaatgctgactaatcagaggaaagttagcattttccggcccaggctaagagaagtagataagttagattcaaattgatacaacatccccttgacgaattcgcaacgaaaagtcgtccctcacttgccgcttgatcacacccacgaactcacaattcggcccctcgtgacaagccccttgttgaaacgacctctttcaatgcgacgtggttggagatttgtcatcttacgactccgacgtaactaccgtcatgcctccccgattatgtgatgctatccgccctgctgggtggagcattctcgggttgagtaacctacatcctttactccttggactccggtcccccggtctaagccgcttggaatatgacagggttattttccaaacatcttctttctactcttaagtgttctatacttaagaagggtatgtgttgccccttccttcttggagaacgtgcgcggcggtctttccgtctctcgaaaagcgtgcgtgcaacatgcagagacctgtgaagaaagcagtctttgaactagccttagtgcagacaagaaactggctgtagcgacctcacactagcagcggacacccctcctggtaacaggagcccctgcggccaaaagccacgtggataggatccactggtgtgagcggtgcatccccagcaccctggtttcttggttgtactctggtgaacccagagatggcaatcttaagcaactctgtagagaagccaagaatgtccggaaggtaccccgcttcggtgggatctgatccggagactcgtccacagtgctctacactgtggctcgggtttaaaaactgtcacagcttctccaaaccaagtggtcttggttttccctttttactcattgtgtcacg

SEQ ID NO: 22595 - DNA, 850 bp, synthetic construct
  source 1..850: mol_type = other DNA
tttccggcccaggctaagagaagtagataagttagattcaaattgatacaacatccccttgacgaattcgcaacgaaaagtcgtccctcacttgccgcttgatcacacccacgaactcacaattcggcccctcgtgacaagccccttgttgaaacgacctctttcaatgcgacgtggttggagatttgtcatcttacgactccgacgtaactaccgtcatgcctccccgattatgtgatgctatccgccctgctgggtggagcattctcgggttgagtaacctacatcctttactccttggactccggtcccccggtctaagccgcttggaatatgacagggttattttccaaacatcttctttctactcttaagtgttctatacttaagaagggtatgtgttgccccttccttcttggagaacgtgcgcggcggtctttccgtctctcgaaaagcgtgcgtgcaacatgcagagacctgtgaagaaagcagtctttgaactagccttagtgcagacaagaaactggctgtagcgacctcacactagcagcggacacccctcctggtaacaggagcccctgcggccaaaagccacgtggataggatccactggtgtgagcggtgcatccccagcaccctggtttcttggttgtactctggtgaacccagagatggcaatcttaagcaactctgtagagaagccaagaatgtccggaaggtaccccgcttcggtgggatctgatccggagactcgtccacagtgctctacactgtggctcgggtttaaaaactgtcacagcttctccaaaccaagtggtcttggttttccctttttactcattgtgtcacg

SEQ ID NO: 22596 - DNA, 800 bp, synthetic construct
  source 1..800: mol_type = other DNA
acatccccttgacgaattcgcaacgaaaagtcgtccctcacttgccgcttgatcacacccacgaactcacaattcggcccctcgtgacaagccccttgttgaaacgacctctttcaatgcgacgtggttggagatttgtcatcttacgactccgacgtaactaccgtcatgcctccccgattatgtgatgctatccgccctgctgggtggagcattctcgggttgagtaacctacatcctttactccttggactccggtcccccggtctaagccgcttggaatatgacagggttattttccaaacatcttctttctactcttaagtgttctatacttaagaagggtatgtgttgccccttccttcttggagaacgtgcgcggcggtctttccgtctctcgaaaagcgtgcgtgcaacatgcagagacctgtgaagaaagcagtctttgaactagccttagtgcagacaagaaactggctgtagcgacctcacactagcagcggacacccctcctggtaacaggagcccctgcggccaaaagccacgtggataggatccactggtgtgagcggtgcatccccagcaccctggtttcttggttgtactctggtgaacccagagatggcaatcttaagcaactctgtagagaagccaagaatgtccggaaggtaccccgcttcggtgggatctgatccggagactcgtccacagtgctctacactgtggctcgggtttaaaaactgtcacagcttctccaaaccaagtggtcttggttttccctttttactcattgtgtcacg

SEQ ID NO: 22597 - DNA, 750 bp, synthetic construct
  source 1..750: mol_type = other DNA
gatcacacccacgaactcacaattcggcccctcgtgacaagccccttgttgaaacgacctctttcaatgcgacgtggttggagatttgtcatcttacgactccgacgtaactaccgtcatgcctccccgattatgtgatgctatccgccctgctgggtggagcattctcgggttgagtaacctacatcctttactccttggactccggtcccccggtctaagccgcttggaatatgacagggttattttccaaacatcttctttctactcttaagtgttctatacttaagaagggtatgtgttgccccttccttcttggagaacgtgcgcggcggtctttccgtctctcgaaaagcgtgcgtgcaacatgcagagacctgtgaagaaagcagtctttgaactagccttagtgcagacaagaaactggctgtagcgacctcacactagcagcggacacccctcctggtaacaggagcccctgcggccaaaagccacgtggataggatccactggtgtgagcggtgcatccccagcaccctggtttcttggttgtactctggtgaacccagagatggcaatcttaagcaactctgtagagaagccaagaatgtccggaaggtaccccgcttcggtgggatctgatccggagactcgtccacagtgctctacactgtggctcgggtttaaaaactgtcacagcttctccaaaccaagtggtcttggttttccctttttactcattgtgtcacg

SEQ ID NO: 22598 - DNA, 700 bp, synthetic construct
  source 1..700: mol_type = other DNA
gaaacgacctctttcaatgcgacgtggttggagatttgtcatcttacgactccgacgtaactaccgtcatgcctccccgattatgtgatgctatccgccctgctgggtggagcattctcgggttgagtaacctacatcctttactccttggactccggtcccccggtctaagccgcttggaatatgacagggttattttccaaacatcttctttctactcttaagtgttctatacttaagaagggtatgtgttgccccttccttcttggagaacgtgcgcggcggtctttccgtctctcgaaaagcgtgcgtgcaacatgcagagacctgtgaagaaagcagtctttgaactagccttagtgcagacaagaaactggctgtagcgacctcacactagcagcggacacccctcctggtaacaggagcccctgcggccaaaagccacgtggataggatccactggtgtgagcggtgcatccccagcaccctggtttcttggttgtactctggtgaacccagagatggcaatcttaagcaactctgtagagaagccaagaatgtccggaaggtaccccgcttcggtgggatctgatccggagactcgtccacagtgctctacactgtggctcgggtttaaaaactgtcacagcttctccaaaccaagtggtcttggttttccctttttactcattgtgtcacg

SEQ ID NO: 22599 - DNA, 650 bp, synthetic construct
  source 1..650: mol_type = other DNA
tccgacgtaactaccgtcatgcctccccgattatgtgatgctatccgccctgctgggtggagcattctcgggttgagtaacctacatcctttactccttggactccggtcccccggtctaagccgcttggaatatgacagggttattttccaaacatcttctttctactcttaagtgttctatacttaagaagggtatgtgttgccccttccttcttggagaacgtgcgcggcggtctttccgtctctcgaaaagcgtgcgtgcaacatgcagagacctgtgaagaaagcagtctttgaactagccttagtgcagacaagaaactggctgtagcgacctcacactagcagcggacacccctcctggtaacaggagcccctgcggccaaaagccacgtggataggatccactggtgtgagcggtgcatccccagcaccctggtttcttggttgtactctggtgaacccagagatggcaatcttaagcaactctgtagagaagccaagaatgtccggaaggtaccccgcttcggtgggatctgatccggagactcgtccacagtgctctacactgtggctcgggtttaaaaactgtcacagcttctccaaaccaagtggtcttggttttccctttttactcattgtgtcacg

SEQ ID NO: 22600 - DNA, 600 bp, synthetic construct
  source 1..600: mol_type = other DNA
tgctgggtggagcattctcgggttgagtaacctacatcctttactccttggactccggtcccccggtctaagccgcttggaatatgacagggttattttccaaacatcttctttctactcttaagtgttctatacttaagaagggtatgtgttgccccttccttcttggagaacgtgcgcggcggtctttccgtctctcgaaaagcgtgcgtgcaacatgcagagacctgtgaagaaagcagtctttgaactagccttagtgcagacaagaaactggctgtagcgacctcacactagcagcggacacccctcctggtaacaggagcccctgcggccaaaagccacgtggataggatccactggtgtgagcggtgcatccccagcaccctggtttcttggttgtactctggtgaacccagagatggcaatcttaagcaactctgtagagaagccaagaatgtccggaaggtaccccgcttcggtgggatctgatccggagactcgtccacagtgctctacactgtggctcgggtttaaaaactgtcacagcttctccaaaccaagtggtcttggttttccctttttactcattgtgtcacg

SEQ ID NO: 22601 - DNA, 550 bp, synthetic construct
  source 1..550: mol_type = other DNA
gactccggtcccccggtctaagccgcttggaatatgacagggttattttccaaacatcttctttctactcttaagtgttctatacttaagaagggtatgtgttgccccttccttcttggagaacgtgcgcggcggtctttccgtctctcgaaaagcgtgcgtgcaacatgcagagacctgtgaagaaagcagtctttgaactagccttagtgcagacaagaaactggctgtagcgacctcacactagcagcggacacccctcctggtaacaggagcccctgcggccaaaagccacgtggataggatccactggtgtgagcggtgcatccccagcaccctggtttcttggttgtactctggtgaacccagagatggcaatcttaagcaactctgtagagaagccaagaatgtccggaaggtaccccgcttcggtgggatctgatccggagactcgtccacagtgctctacactgtggctcgggtttaaaaactgtcacagcttctccaaaccaagtggtcttggttttccctttttactcattgtgtcacg

SEQ ID NO: 22602 - DNA, 500 bp, synthetic construct
  source 1..500: mol_type = other DNA
caaacatcttctttctactcttaagtgttctatacttaagaagggtatgtgttgccccttccttcttggagaacgtgcgcggcggtctttccgtctctcgaaaagcgtgcgtgcaacatgcagagacctgtgaagaaagcagtctttgaactagccttagtgcagacaagaaactggctgtagcgacctcacactagcagcggacacccctcctggtaacaggagcccctgcggccaaaagccacgtggataggatccactggtgtgagcggtgcatccccagcaccctggtttcttggttgtactctggtgaacccagagatggcaatcttaagcaactctgtagagaagccaagaatgtccggaaggtaccccgcttcggtgggatctgatccggagactcgtccacagtgctctacactgtggctcgggtttaaaaactgtcacagcttctccaaaccaagtggtcttggttttccctttttactcattgtgtcacg

SEQ ID NO: 22603 - DNA, 503 bp, synthetic construct
  source 1..503: mol_type = other DNA
ttctccccaccccctccaattcccttttccccctcttgcaacttagaagtttgtacacacagggcaataggatacgtgatccagccaggacacgtgagctcaagcacttctgtttccccgtccccttcacgtactacgggaatgttagtaatttgtgtgcactttagtaaggttgatccgggattaaccccaaatcccagaaactggtgatgagcgttaccacccccgccgggcgaccggaaggtttcgctgcgttggcaccagggcttcggcaccagaaaaaggtaaagcaaatgaaggcgctactgtgctacgagaagtttcctccaggcccctgaatgcggctaatcctaaccagtgatccaccggtgcaaaaccatgtactaggtggtcgtaacgcgcaagtcgctggcggaaccgactactttgggtgtcctgtgtttccatattttattttattcaattttatggtgacaagagtaaagagatacagatttgcagcc

SEQ ID NO: 22604 - DNA, 534 bp, synthetic construct
  source 1..534: mol_type = other DNA
tcctaaaactcccacccatgaaacgttagaagcttgacatttaagtacaataggtggcaccacatccagtggtgtctacgtacaagcacttctgtttccccggagcgaggtataggctgtacccactgccaaaagcctttaaccgttatccgccaaccaactacgtaacagctagtatcatcttgttcttcactggacgttcgatcaggtggattccccctccactagtttggtcgatgaggctaggagctccccacgggtgaccgtgtcctagcctgcgtggcggccaacccagctcatgctgggacgcccttttaaggacatggtgtgaagactcgcatgtgcttggttgtgagtcctccggcccctgaatgcggctaaccttaaccctggagccttatgccacgaaccagtggttgtaaggtcgtaacgagcaattccgggatgggaccgactactttgggtgtccgtgtttcctatttttctttatattgtcttatggtcacagcatatatataagtatatactgtgatc

SEQ ID NO: 22605 - DNA, 546 bp, synthetic construct
  source 1..546: mol_type = other DNA
cccatttgtacccttccttgatttcctccccatgtaacgttagaagtttcggaattttaaagtacaataggaagcgccacatccagtggtgttgtgtacaagcacttctgtttacccggggcgaggtataggctgtgcccacggccaaaaacctttaaccgttatccgccaaccaactacgtaacggctagtatcatcttgtttctgacttggcgttcgatcaggtggtaacccccactagtctggtcgatgaggctaggaattccccacgggcgaccgtgtcctagcctgcgtggcggccagcccagcttttgctgggacgccttttcaaagacatggtgtgaagacccgcatgtgcttggttgtgagtcctccggcccctgaatgcggctaaccttaaccctggagcccagtgacataatccaatgttatttgggtcgtaatgagtaattccgggatgggaccgactactttgggtgtccgtgtttccttttattctttataatgtcttatggtcacagcatatatattgtatatactgtgatc

SEQ ID NO: 22606 - DNA, 548 bp, synthetic construct
  source 1..548: mol_type = other DNA
ccaggtgggttttcgtcaagcacttctgtttccccggacctagtaccaataggctgtacccacggctgaaggggaaaacgttcgttacccggctacctacttcgaaaagcctagtatcatcatagaatgtctcaagtgttacgctcagcacaaccccagtgtagttcaggtcgatgagtcaccgaattccccacgggcgaccgtgtcggtggctgcgttggcggcctgcctgcgagtttcactcgcaggacgcttgattcatgacatggtgtgaagagcctattgagctaggtagtagtcctccggcccctgaatgcggctaatcctaaccacggagccatgcgtcacaatccagtgatgtcgtggtcgtaacgagcaattctgtggcggaaccgactactttgggtgtccgtgtttcctgttttatttaccttggctgcttatggtgacaattgtatagttgtcatcatatagctattggattggccatccggatatatacaagcaactagtgttcacactacctcttttgctataacacaagtatc

SEQ ID NO: 22607 - DNA, 552 bp, synthetic construct
  source 1..552: mol_type = other DNA
cactgggattccggtcactttgtacgcctgtttgaccacccccccccatgcaacttagaaaatatacacatagcccaataggatgcggccaaaccaggttcgtcacgggcaagcacttctgtttccccgggtgtgtgaatagaccctaccagggttgaagctgtagcactcgttatccgcatggctactacgcaaatgttagtaacaccctctattgtacttgggatttcgttccgcagataccccatctgtagattagggcgatgaggctacacactccccactggcgacagtggtgtagcctgcgtggcgccctacctgggtctcctgacccaggattccacttacaagacagggtgtgaaggcacaagtgtgctagtcatgagtcctccggcccctgaatgcggctaatcttaaccccgtagccattgcaggcaaaccagtctgtggatggtcgtaatgggtaactacgggatggaaccgactactttgggtgaccgtgtttctcttttttctttatgtaggcactttatggttacaacataagtaacc

SEQ ID NO: 22608 - DNA, 502 bp, synthetic construct
  source 1..502: mol_type = other DNA
caacttagaaaatatacacatagcccaataggatgcggccaaaccaggttcgtcacgggcaagcacttctgtttccccgggtgtgtgaatagaccctaccagggttgaagctgtagcactcgttatccgcatggctactacgcaaatgttagtaacaccctctattgtacttgggatttcgttccgcagataccccatctgtagattagggcgatgaggctacacactccccactggcgacagtggtgtagcctgcgtggcgccctacctgggtctcctgacccaggattccacttacaagacagggtgtgaaggcacaagtgtgctagtcatgagtcctccggcccctgaatgcggctaatcttaaccccgtagccattgcaggcaaaccagtctgtggatggtcgtaatgggtaactacgggatggaaccgactactttgggtgaccgtgtttctcttttttctttatgtaggcactttatggttacaacataagtaacc

SEQ ID NO: 22609 - DNA, 553 bp, synthetic construct
  source 1..553: mol_type = other DNA
gcttgcacgccagtttttaccccccttttcccaatttgtaacattagaagtttgtactattaatttggtcaataggaggtagcaagccatgctatctaagaccaagcacttctgttaccccggtatacggagaatagactccaaaagggttgaagctccaaatatcgttatccgcacaattactacgcaaagcctagtaacatcttgataagctctttggttggtcgctcagctgttacccccagtagacttggcagatgaggctgggtattccccactggcgacagtgacccagcctgcgtggctgcctacacacctggcgacaggtgtgaagccaaaagtggacaaggtgtgaagagccccgtgtgctaattgtgattcctccggcccctgaatgcggctaatccaaccccacagccaatgcatgtaaaccaacatgtatttggtcgtaacgggcaactgtgggacggaaccgactactttgggtgtccgtgtttccttttattttaaatgacttgcttatggtgacaaatattggtgtatatttgtcatc

SEQ ID NO: 22610 - DNA, 503 bp, synthetic construct
  source 1..503: mol_type = other DNA
tttgtactattaatttggtcaataggaggtagcaagccatgctatctaagaccaagcacttctgttaccccggtatacggagaatagactccaaaagggttgaagctccaaatatcgttatccgcacaattactacgcaaagcctagtaacatcttgataagctctttggttggtcgctcagctgttacccccagtagacttggcagatgaggctgggtattccccactggcgacagtgacccagcctgcgtggctgcctacacacctggcgacaggtgtgaagccaaaagtggacaaggtgtgaagagccccgtgtgctaattgtgattcctccggcccctgaatgcggctaatccaaccccacagccaatgcatgtaaaccaacatgtatttggtcgtaacgggcaactgtgggacggaaccgactactttgggtgtccgtgtttccttttattttaaatgacttgcttatggtgacaaatattggtgtatatttgtcatc

SEQ ID NO: 22611 - DNA, 555 bp, synthetic construct
  source 1..555: mol_type = other DNA
caccacgaacaagcacttctgtttccccggtgaggctgtatagactgtgcccacggtctaaaacggcagatccgttacccgctcaagtacttcgagaagcctagtatcaccttggaatcttcgatgcgttgcgctcagcaccctacccccgggtgtagcttaggtcgatgagtctgggcatgccccaccggcgacggtggcccaggctgcgttggcggcctacccatggctaacgccatgggacgctagttgtgaacaaggtgtgaagagcctattgagctacttgagagtcctccggcccctgaatgcggctaatcccaaccacggagcaagtgcctgcatgccagcaggtagcttgtcgtaacgcgcaagtctgtggcggaaccgactactttgggtgtccgtgtttccttttattcttataatggctgcttatggtgacaatctaagattgttatcatatagcttttggattggccatccggtgattatttgacttttgagcacttgtttaccttatctcatcacatattcatttaattgcttgattgcata

SEQ ID NO: 22612 - DNA, 505 bp, synthetic construct
  source 1..505: mol_type = other DNA
ccacggtctaaaacggcagatccgttacccgctcaagtacttcgagaagcctagtatcaccttggaatcttcgatgcgttgcgctcagcaccctacccccgggtgtagcttaggtcgatgagtctgggcatgccccaccggcgacggtggcccaggctgcgttggcggcctacccatggctaacgccatgggacgctagttgtgaacaaggtgtgaagagcctattgagctacttgagagtcctccggcccctgaatgcggctaatcccaaccacggagcaagtgcctgcatgccagcaggtagcttgtcgtaacgcgcaagtctgtggcggaaccgactactttgggtgtccgtgtttccttttattcttataatggctgcttatggtgacaatctaagattgttatcatatagcttttggattggccatccggtgattatttgacttttgagcacttgtttaccttatctcatcacatattcatttaattgcttgattgcata

SEQ ID NO: 22613 - DNA, 560 bp, synthetic construct
  source 1..560: mol_type = other DNA
ccggttcagtgaacaaacagctaggcaagtccctcccttcccctgtggtcggttctcaccggccaccatccctcccccagcctgacgtgttacaggctgtgcaaagcccccgcgaaagctgctcacgtggcaattgtgggtcccccctttgtcaagacaccgagtctttctcccttaaggctagcccggtcccacgaacgtggaactggcaactagtggtgtcactacacgcctccgacctcggacgcggagtgctgttccccaagctgtaaccctgacccaagactgtgctgcctggcaagcaccgtctgggaagatgttccgctgtggctgccaaacctggtaacaggtgccccagtgtgtgtagtcttcctccagtctccggactggcagtcttgtgtaaagatgcagtgtaaggttcaagtgccaaatccctggaaggagtgaccctctactgccctaggaatgctgtgcaggtacccccaacttcggttggggatctgagcacaggctaattgtctacgggtagtttcatttcccatcctctcttttttggcatc

SEQ ID NO: 22614 - DNA, 510 bp, synthetic construct
  source 1..510: mol_type = other DNA
ggttctcaccggccaccatccctcccccagcctgacgtgttacaggctgtgcaaagcccccgcgaaagctgctcacgtggcaattgtgggtcccccctttgtcaagacaccgagtctttctcccttaaggctagcccggtcccacgaacgtggaactggcaactagtggtgtcactacacgcctccgacctcggacgcggagtgctgttccccaagctgtaaccctgacccaagactgtgctgcctggcaagcaccgtctgggaagatgttccgctgtggctgccaaacctggtaacaggtgccccagtgtgtgtagtcttcctccagtctccggactggcagtcttgtgtaaagatgcagtgtaaggttcaagtgccaaatccctggaaggagtgaccctctactgccctaggaatgctgtgcaggtacccccaacttcggttggggatctgagcacaggctaattgtctacgggtagtttcatttcccatcctctcttttttggcatc

SEQ ID NO: 22615 - DNA, 562 bp, synthetic construct
  source 1..562: mol_type = other DNA
cttcaccgaccggcagtgtccaaaatgctaggtgaatcccctccctttcctctgggcttctgcccagcttcctccccccagcctgacgtgacacaggctgtgcaaagaccccgcgaaagctgccaaaagtggcaattgtgggtcccccctttgtaaaggcgtcgagtctttctccctcaaggctagacccgtcagtgaattctgtcgggcaactagtgacgccactgcacgcctctgacctcggccgcggagtgctgccccccaagtcgtgcccctgaccacaagttgtgctgtctggcaaacattgtctgtgagaatgttccgctgtggctgccaagcctggcaacaggctgccccagtgtgcgtagttctcatccagacttcggtctggcaacttgctgttaagacacggcgtaaggggcgtgtgccaacgccctggaacgagtgtccactctaataccccgaggaatgctacgcaggtacccctggttcgccagggatctgagcgtaggctaattgtctaagggtattttcatttcccattctttctttcttgttcata

SEQ ID NO: 22616 - DNA, 512 bp, synthetic construct
  source 1..512: mol_type = other DNA
tctgggcttctgcccagcttcctccccccagcctgacgtgacacaggctgtgcaaagaccccgcgaaagctgccaaaagtggcaattgtgggtcccccctttgtaaaggcgtcgagtctttctccctcaaggctagacccgtcagtgaattctgtcgggcaactagtgacgccactgcacgcctctgacctcggccgcggagtgctgccccccaagtcgtgcccctgaccacaagttgtgctgtctggcaaacattgtctgtgagaatgttccgctgtggctgccaagcctggcaacaggctgccccagtgtgcgtagttctcatccagacttcggtctggcaacttgctgttaagacacggcgtaaggggcgtgtgccaacgccctggaacgagtgtccactctaataccccgaggaatgctacgcaggtacccctggttcgccagggatctgagcgtaggctaattgtctaagggtattttcatttcccattctttctttcttgttcata

SEQ ID NO: 22617 - DNA, 562 bp, synthetic construct
  source 1..562: mol_type = other DNA
acactgttattacggtaaccttgtacgccagttttatcatccctttccctttgtaacttagaagttttaaacttgagaccaataggtggtgatcagccagatcactaaaggtcaagcacttctgtctccccggtcaacgctgatatgctccgccagggcaaaaacagctgcgatcgttatccgcaaagtgcctacgcaaagcctagtaatatcttgaatgatatatggttggtcgttcagctaaaccccatagtagacctggcagatgaggctggaaataccccactggtgacagtgttccagcctgcgtggctgcctgcgcactcttgcgagtgcgaagccatatatttgacaaggtgtgaagagccccgtgtgctcactttgagtcctccggcccctgaatgtggctaaccttaaccctgcagctagtgcatacaatccagtgtgtggctagtcgtaatgagcaattgcgggatgggaccaactactttgggtgtccgtgtttcactttttcctttataatttgcttatggtgacagtatatagcttatatattgttacc

SEQ ID NO: 22618 - DNA, 512 bp, synthetic construct
  source 1..512: mol_type = other DNA
ttgtaacttagaagttttaaacttgagaccaataggtggtgatcagccagatcactaaaggtcaagcacttctgtctccccggtcaacgctgatatgctccgccagggcaaaaacagctgcgatcgttatccgcaaagtgcctacgcaaagcctagtaatatcttgaatgatatatggttggtcgttcagctaaaccccatagtagacctggcagatgaggctggaaataccccactggtgacagtgttccagcctgcgtggctgcctgcgcactcttgcgagtgcgaagccatatatttgacaaggtgtgaagagccccgtgtgctcactttgagtcctccggcccctgaatgtggctaaccttaaccctgcagctagtgcatacaatccagtgtgtggctagtcgtaatgagcaattgcgggatgggaccaactactttgggtgtccgtgtttcactttttcctttataatttgcttatggtgacagtatatagcttatatattgttacc

SEQ ID NO: 22619 - DNA, 562 bp, synthetic construct
  source 1..562: mol_type = other DNA
actctattatcccggtaatcttgtacgccagttttatatcccttccctttttgtaacttagaagttaaacacacagaccaataggtggtggctatccaagtcattaatggtcaagcacttctgtttccccggtttagattgatacgctccaccagggcgaaaacaatttaaatcgttatccgcaaaatgactacgcaaagcctagtaatatcttgaaggacttatggttggtcgctccactaaaccccatagtagacctggcagatgaggctagaaataccccactggagacagtgttctagcctgcgtggctgcctgcacaccctatgggtgtgaagccatactttcgacaaggtgtgaagagccccgtgtgctcattttgagtcctccggcccctgaatgtggctaaccttaaccctgcagctagtgcatgcaatccagcatgttgctagtcgtaacgagcaattgcgggatgggaccaactactttgggtgtccgtgtttcactttttccttttatttgcttatggtgacaatatatatagtacatatatattggcatc

SEQ ID NO: 22620 - DNA, 512 bp, synthetic construct
  source 1..512: mol_type = other DNA
ttgtaacttagaagttaaacacacagaccaataggtggtggctatccaagtcattaatggtcaagcacttctgtttccccggtttagattgatacgctccaccagggcgaaaacaatttaaatcgttatccgcaaaatgactacgcaaagcctagtaatatcttgaaggacttatggttggtcgctccactaaaccccatagtagacctggcagatgaggctagaaataccccactggagacagtgttctagcctgcgtggctgcctgcacaccctatgggtgtgaagccatactttcgacaaggtgtgaagagccccgtgtgctcattttgagtcctccggcccctgaatgtggctaaccttaaccctgcagctagtgcatgcaatccagcatgttgctagtcgtaacgagcaattgcgggatgggaccaactactttgggtgtccgtgtttcactttttccttttatttgcttatggtgacaatatatatagtacatatatattggcatc

SEQ ID NO: 22621 - DNA, 564 bp, synthetic construct
  source 1..564: mol_type = other DNA
actctgtcattccggtgactttgtacgccagtttttacaccccccccttcttgtaacttagaagaattaagttcagaccaataggaaaacgacaaaccagtcgtttaaggtcaagcacttctgtttccccggtcaatgctgatatgcttcaccaaggcaaaaacagcagcgatcgttacccgcaagacgcctacgcaaagcctagtaatgcctttgaagatatttgtctggtcactcaggtacaatcccagtactagacctggcagatgaggctggaaaatccccactggcgacagtgttccagcctgcgtggctgcctgcacacccatacgggtgtgaagccaaatattggacaaggtgtgaagagccccgtgtgctcgtcttgagtcctccggcccctgaatgcggctaaccttaaccccacagccattgcttgcattccagcaagtctatggtcgtaatgagcaattgtgggatgggaccgactactttgggtgtccgtgtttcactttttaccttttattatgcttatggtgacaatatatagcgttatatattggcatc

SEQ ID NO: 22622 - DNA, 514 bp, synthetic construct
  source 1..514: mol_type = other DNA
ttgtaacttagaagaattaagttcagaccaataggaaaacgacaaaccagtcgtttaaggtcaagcacttctgtttccccggtcaatgctgatatgcttcaccaaggcaaaaacagcagcgatcgttacccgcaagacgcctacgcaaagcctagtaatgcctttgaagatatttgtctggtcactcaggtacaatcccagtactagacctggcagatgaggctggaaaatccccactggcgacagtgttccagcctgcgtggctgcctgcacacccatacgggtgtgaagccaaatattggacaaggtgtgaagagccccgtgtgctcgtcttgagtcctccggcccctgaatgcggctaaccttaaccccacagccattgcttgcattccagcaagtctatggtcgtaatgagcaattgtgggatgggaccgactactttgggtgtccgtgtttcactttttaccttttattatgcttatggtgacaatatatagcgttatatattggcatc

SEQ ID NO: 22623 - DNA, 564 bp, synthetic construct
  source 1..564: mol_type = other DNA
gctctgttattccggtaaccttgcacgccagttttatcacccctttccccatgtaacttagaagttttaaacacagaccaatagggagcgacaaaccagtcgtgaaaggtcaagcacttctgtttccccggtcaacgttgatatgctctcccagggcaaaaacaacagcgatcgttacccgcaagatgcctacgcaaagcttagtaacgccctcgaagatactcggttggtcgttcatgtgcaaccccagcattagacctggcagatgaggctagaaattccccactggcgacagtgttctagcctgcgtggctgcctgcacaccctgacgggtgtgaagcctagtattggacaaggtgtgaagagccccgtgtgctcatcttgagtcctccggcccctgaatgcggctaaccttaaacctgcagccattgctcacaatccagtgagtttgtggtcgtaatgagcaattgcgggatgggaccgactactttgggtgtccgtgtttctctttttaccttacattttagcttatggtgacaatatatagtgatatatattggcatc

SEQ ID NO: 22624 - DNA, 514 bp, synthetic construct
  source 1..514: mol_type = other DNA
atgtaacttagaagttttaaacacagaccaatagggagcgacaaaccagtcgtgaaaggtcaagcacttctgtttccccggtcaacgttgatatgctctcccagggcaaaaacaacagcgatcgttacccgcaagatgcctacgcaaagcttagtaacgccctcgaagatactcggttggtcgttcatgtgcaaccccagcattagacctggcagatgaggctagaaattccccactggcgacagtgttctagcctgcgtggctgcctgcacaccctgacgggtgtgaagcctagtattggacaaggtgtgaagagccccgtgtgctcatcttgagtcctccggcccctgaatgcggctaaccttaaacctgcagccattgctcacaatccagtgagtttgtggtcgtaatgagcaattgcgggatgggaccgactactttgggtgtccgtgtttctctttttaccttacattttagcttatggtgacaatatatagtgatatatattggcatc

SEQ ID NO: 22625 - DNA, 564 bp, synthetic construct
  source 1..564: mol_type = other DNA
ggacttgtattacggtacatttccataccagttttataacccctaccctgaaacttttagaagcatgtacacatacagaccaacaggtggcaatcagccagattgctaacggtcaagcacttctgtttccccggtaatcttgcatacgcttcacccgaggcgaaaagtgagattatcgttatccgcaaagtgcctacgagaagcccagtagcacattgaaagcctatggttggtcgctcagctgttcacccaacagtagacctggcagatgaggctagatattccccaccagcgatggtgatctagcctgcgtggctgcctgcacaccctatcgggtgtgaagccagaaagtggacaaggtgtgaagagcctattgtgctcactttgagtcctccggcccctgaatgtggctaatcctaaccccgtagctgttgcatgtaacccaacatgtctgcagtcgtaatgggcaactacgggatggaaccaactactttgggtgtccgtgtttcttgtttttctttatatttgcttatggtgacaattgtagatactacacttgttacc

SEQ ID NO: 22626 - DNA, 514 bp, synthetic construct
  source 1..514: mol_type = other DNA
aaacttttagaagcatgtacacatacagaccaacaggtggcaatcagccagattgctaacggtcaagcacttctgtttccccggtaatcttgcatacgcttcacccgaggcgaaaagtgagattatcgttatccgcaaagtgcctacgagaagcccagtagcacattgaaagcctatggttggtcgctcagctgttcacccaacagtagacctggcagatgaggctagatattccccaccagcgatggtgatctagcctgcgtggctgcctgcacaccctatcgggtgtgaagccagaaagtggacaaggtgtgaagagcctattgtgctcactttgagtcctccggcccctgaatgtggctaatcctaaccccgtagctgttgcatgtaacccaacatgtctgcagtcgtaatgggcaactacgggatggaaccaactactttgggtgtccgtgtttcttgtttttctttatatttgcttatggtgacaattgtagatactacacttgttacc

SEQ ID NO: 22627 - DNA, 565 bp, synthetic construct
  source 1..565: mol_type = other DNA
gtttccccggaccgagtatcaatagactgcttacgcggttgaaggagaaaacgttcgttacccggctaactacttcgagaaacctagtagcaccatgaaagttgcagagtgtttcgctcagcacttcccccgtgtagatcaggtcgatgagccactgtgaaccccacgggcgaccgtgacagtggctgcgttggcggcctgcccatggggcaacccgtgggacgctctaatacagacatggtgtgaagagtctattgagctagttagtaatcctccggcccctgaatgcggctaatcctaactgcggagcacgcaccctcaatccagggggcagtgtgtcgtaacgggtaactctgcagcggaaccgactactttgggtgtccgtgtttccttttattccttactggctgcttatggtgacaatcaaagagttgttaccatatagctattggattggccatccggtgtctaacagagctattgtctacctgttcattggatacgtccctctcaattacaagactctccaaactcttaactacatactgctacttaatcataagaa

SEQ ID NO: 22628 - DNA, 515 bp, synthetic construct
  source 1..515: mol_type = other DNA
acgttcgttacccggctaactacttcgagaaacctagtagcaccatgaaagttgcagagtgtttcgctcagcacttcccccgtgtagatcaggtcgatgagccactgtgaaccccacgggcgaccgtgacagtggctgcgttggcggcctgcccatggggcaacccgtgggacgctctaatacagacatggtgtgaagagtctattgagctagttagtaatcctccggcccctgaatgcggctaatcctaactgcggagcacgcaccctcaatccagggggcagtgtgtcgtaacgggtaactctgcagcggaaccgactactttgggtgtccgtgtttccttttattccttactggctgcttatggtgacaatcaaagagttgttaccatatagctattggattggccatccggtgtctaacagagctattgtctacctgttcattggatacgtccctctcaattacaagactctccaaactcttaactacatactgctacttaatcataagaa

SEQ ID NO: 22629 - DNA, 565 bp, synthetic construct
  source 1..565: mol_type = other DNA
acactgttattccggtaaccttgtacgccagttttatatcccttcccccccttgtaacttagaagacatgcgaatcgaccaatagcaggcaatcaaccagattgtcaccggtcaagcacttctgtttccccggctctcgttgatatgctccaacagggcaaaaacaattggagtcgttacccgcaagatgcctacgcaaaacctagtagcatcttcgaagatttttggttggtcgctcagttgctaccccagcaatagacctggcagatgaggctagaaataccccactggtgacagtgttctagcctgcgtggctgcctgcacacccacacgggtgtgaagccaaagattggacaaggtgtgaagagtcacgtgtgctcatcttgagtcctccggcccctgaatgcggctaaccttaaccccgtagccattgctcgcaatccagcgagtatatggtcgtaatgagtaattacgggatgggaccgactactttgggtgtccgtgtttcactttttacttatcaatttgcttatggtgacaatatatatagatatatattgacacc

SEQ ID NO: 22630 - DNA, 515 bp, synthetic construct
  source 1..515: mol_type = other DNA
cttgtaacttagaagacatgcgaatcgaccaatagcaggcaatcaaccagattgtcaccggtcaagcacttctgtttccccggctctcgttgatatgctccaacagggcaaaaacaattggagtcgttacccgcaagatgcctacgcaaaacctagtagcatcttcgaagatttttggttggtcgctcagttgctaccccagcaatagacctggcagatgaggctagaaataccccactggtgacagtgttctagcctgcgtggctgcctgcacacccacacgggtgtgaagccaaagattggacaaggtgtgaagagtcacgtgtgctcatcttgagtcctccggcccctgaatgcggctaaccttaaccccgtagccattgctcgcaatccagcgagtatatggtcgtaatgagtaattacgggatgggaccgactactttgggtgtccgtgtttcactttttacttatcaatttgcttatggtgacaatatatatagatatatattgacacc

SEQ ID NO: 22631 - DNA, 565 bp, synthetic construct
  source 1..565: mol_type = other DNA
gctctgtcattccggtgaccttgcacgccagttttatcaccccttccctcttgtaacttagaagaattaaactcagaccaataggaagcgacaagccagtcgtgacaggtcaagcacttctgtttccccggtcaaagttgatatgcttcaccaaggcaaaaacaacagcgatcgttatccgcaagatgcctacgcaaagcctagtagtgcctttgaaaatatttgtctggttgctcaagtacaaccccagtactaaacctggcagatgaggctggagcttccccactggtaacagtgttccagcctgcgtggctgcctgcacacccttacgggtgtgaagccaaatattggacaaggtgtgaagagccccgtgtgctcatcttgagtcctccggcccctgaatgcggctaaccttaaccccacagccattgctcacaatccagtgagtgtatggtcgtaacgagcaattgtgggatgggaccgactactttgggtgtccgtgtttctcttttttcctttttaattctgcttatggtgacaatatatagtgttatatattggcatc

SEQ ID NO: 22632 - DNA, 515 bp, synthetic construct
  source 1..515: mol_type = other DNA
ttgtaacttagaagaattaaactcagaccaataggaagcgacaagccagtcgtgacaggtcaagcacttctgtttccccggtcaaagttgatatgcttcaccaaggcaaaaacaacagcgatcgttatccgcaagatgcctacgcaaagcctagtagtgcctttgaaaatatttgtctggttgctcaagtacaaccccagtactaaacctggcagatgaggctggagcttccccactggtaacagtgttccagcctgcgtggctgcctgcacacccttacgggtgtgaagccaaatattggacaaggtgtgaagagccccgtgtgctcatcttgagtcctccggcccctgaatgcggctaaccttaaccccacagccattgctcacaatccagtgagtgtatggtcgtaacgagcaattgtgggatgggaccgactactttgggtgtccgtgtttctcttttttcctttttaattctgcttatggtgacaatatatagtgttatatattggcatc

SEQ ID NO: 22633 - DNA, 565 bp, synthetic construct
  source 1..565: mol_type = other DNA
gctcttgtattacggtacacttgcatgccagttttatctcccccctccccacaatgtaatttagaagccaatcacatgaccaataggaagtggtaagccataccacttaaggtcaagcacttctgtttccccggtatgcgtggaataggcctcttaaggggctgaagccacaattatcgttacccgcatgtgaactacgcgaaacctagtactaccttgaaagtacattgtctggtcgctcagccaatccccatggtagacctggcagatgaggcaagaggtaccccactggtaacagtgttcttgcctgcgtggctgcctgcacacccttaccgggtgtgaagccaatgtatagacagggtgagaagagtcgagtgtgcttcacatgagtcctccggcccctgaatgcggctaatccaaccccgcagctgtagtatgcaagccagcatatgtgcagtcgtaatgggtaactgcgggacggaaccgactactttgggtgtccgtgtttcctgtttttcctttattcatgcttatggtgacaatattgagaattaatattgtcact

SEQ ID NO: 22634 - DNA, 515 bp, synthetic construct
  source 1..515: mol_type = other DNA
acaatgtaatttagaagccaatcacatgaccaataggaagtggtaagccataccacttaaggtcaagcacttctgtttccccggtatgcgtggaataggcctcttaaggggctgaagccacaattatcgttacccgcatgtgaactacgcgaaacctagtactaccttgaaagtacattgtctggtcgctcagccaatccccatggtagacctggcagatgaggcaagaggtaccccactggtaacagtgttcttgcctgcgtggctgcctgcacacccttaccgggtgtgaagccaatgtatagacagggtgagaagagtcgagtgtgcttcacatgagtcctccggcccctgaatgcggctaatccaaccccgcagctgtagtatgcaagccagcatatgtgcagtcgtaatgggtaactgcgggacggaaccgactactttgggtgtccgtgtttcctgtttttcctttattcatgcttatggtgacaatattgagaattaatattgtcact

SEQ ID NO: 22635 - DNA, 565 bp, synthetic construct
  source 1..565: mol_type = other DNA
actctgttattacggtaactttgtacgccagttttatcctccccttaccccatgtaacttagaagtttttcataaagaccaatagttggtaatcatccagattacttaaggtcaagcacttctgtttccccggtcaatgttgatatgctccaacagggcaaaaacaactgcgatcgttatccgcaaagcgcctacgcaaagcttagtagcacctttgagattgtttggttggtcgttccgccatttcccctggtagacctggcagatgaggctagaagtaccccactggcgacagtgttctagcctgcgtggctgcctgcacaccctgtgggtgtgaagccaaataatggacaaggtgtgaagagccccgtgtgctcgctttgagtcctccggcccctgaatgcggctaaccttaaccctgcagctagagcatacaaaccagtgtgtatctagtcgtaatgagcaattgcgggatgggaccgactactttgggtgtccgtgtttcactttttttttacttataattgcttatggtgacaatatatatatagtatatattgacacc

SEQ ID NO: 22636 - DNA, 515 bp, synthetic construct
  source 1..515: mol_type = other DNA
catgtaacttagaagtttttcataaagaccaatagttggtaatcatccagattacttaaggtcaagcacttctgtttccccggtcaatgttgatatgctccaacagggcaaaaacaactgcgatcgttatccgcaaagcgcctacgcaaagcttagtagcacctttgagattgtttggttggtcgttccgccatttcccctggtagacctggcagatgaggctagaagtaccccactggcgacagtgttctagcctgcgtggctgcctgcacaccctgtgggtgtgaagccaaataatggacaaggtgtgaagagccccgtgtgctcgctttgagtcctccggcccctgaatgcggctaaccttaaccctgcagctagagcatacaaaccagtgtgtatctagtcgtaatgagcaattgcgggatgggaccgactactttgggtgtccgtgtttcactttttttttacttataattgcttatggtgacaatatatatatagtatatattgacacc

SEQ ID NO: 22637 - DNA, 566 bp, synthetic construct
  source 1..566: mol_type = other DNA
acactgttattccggtaactttgtacgccagttttatatccccaccccccttttgtaacttagaagttatgcacactgaccaatagtgggcaatcatccagattgtcatcggtcgagcacttctgtttccccggtttgagttgatatgctccaccagggcaaaaacaactcagatcgttatccgcaagatgcctacacagaacttagtaccattctggaaaattcttggctggtcgttcaattactaccccagtaatagacctggcagatgaggctagaagttccccactggcgacagtgttctagcctgcgtggctgcctgcacacccttctggggtgtgaagcctagaattggacagggtgtgaagagtcgcgtgtgctcatcttgagtcctccggcccctgaatgcggctaaccctaaccctgcagccattgcccacaatccagtgggtttatggtcgtaatgagcaattgcgggatgggaccgactactttgggtgtccgtgtttcactttttacttattatttgcttatggtgacaatatatagatacatatattgacacc

SEQ ID NO: 22638 - DNA, 516 bp, synthetic construct
  source 1..516: mol_type = other DNA
ttttgtaacttagaagttatgcacactgaccaatagtgggcaatcatccagattgtcatcggtcgagcacttctgtttccccggtttgagttgatatgctccaccagggcaaaaacaactcagatcgttatccgcaagatgcctacacagaacttagtaccattctggaaaattcttggctggtcgttcaattactaccccagtaatagacctggcagatgaggctagaagttccccactggcgacagtgttctagcctgcgtggctgcctgcacacccttctggggtgtgaagcctagaattggacagggtgtgaagagtcgcgtgtgctcatcttgagtcctccggcccctgaatgcggctaaccctaaccctgcagccattgcccacaatccagtgggtttatggtcgtaatgagcaattgcgggatgggaccgactactttgggtgtccgtgtttcactttttacttattatttgcttatggtgacaatatatagatacatatattgacacc

SEQ ID NO: 22639 - DNA, 566 bp, synthetic construct
  source 1..566: mol_type = other DNA
actctattattacggtaattttgtacgccagttttatatccccttccccttttgtaacttagaagtcgtgaacacagaccaataggtggcgatcacccagatcgcttaaggtcaagcacttctgtttccccggtcaacgttgatatgctccaccagggcaaaaacaacggagatcgttatccgcaaggtgcctacgcaaagcctagtaacctcttggaggatatatggttggtcgctcagctataccccatagtagacctggcagatgaggctagaaactccccactggcgacagtgttctagcctgcgtggctgcctgcgcactcttatgagtgcgaagccatatatttgacaaggtgtgaagagccccgtgtgctcaccttgagtcctccggcccctgaatgtggctaaccctaaccctgcagctagtgcatgaaatccatcatgttgctagtcgtaatgagcaattgcgggatgggaccaactactttgggtgtccgtgtttcactttttccttttatatttgcttatggtgacaatatatatataacatatatattggcatc

SEQ ID NO: 22640 - DNA, 516 bp, synthetic construct
  source 1..516: mol_type = other DNA
tttgtaacttagaagtcgtgaacacagaccaataggtggcgatcacccagatcgcttaaggtcaagcacttctgtttccccggtcaacgttgatatgctccaccagggcaaaaacaacggagatcgttatccgcaaggtgcctacgcaaagcctagtaacctcttggaggatatatggttggtcgctcagctataccccatagtagacctggcagatgaggctagaaactccccactggcgacagtgttctagcctgcgtggctgcctgcgcactcttatgagtgcgaagccatatatttgacaaggtgtgaagagccccgtgtgctcaccttgagtcctccggcccctgaatgtggctaaccctaaccctgcagctagtgcatgaaatccatcatgttgctagtcgtaatgagcaattgcgggatgggaccaactactttgggtgtccgtgtttcactttttccttttatatttgcttatggtgacaatatatatataacatatatattggcatc

SEQ ID NO: 22641 - DNA, 566 bp, synthetic construct
  source 1..566: mol_type = other DNA
actctattatcccggtaattttgtacgccagttttatcctcccctccccatgtaacttagaagctgtacacaacgaccaacaggtaacattcatccagagtgttaaaggtcaagcacttctgtttccccggtcaaagttgatatgctccaacagggcaaaaacaactgcgatcgttatccgcagagcaactacgcaaagcttagtaccactttcaatggtgtatggctggtcgctccactataaacccaatagtagacctggcagatgaggctagaaactccccactggtaacagtgttctagcctgcgtggctgcctgcgtgcccttttgggcacgaagccttacatttgacaaggtgcgaagagccccgtgtgcttgctttgagtcctccggcccctgaatgtggctaaccttaaccctgcagctagtgtgtgcaatccagcacatggctagtcgtaatgagcaattgcgggatgggaccaactactttgggtgtccgtgtttcttgtttttcttttatatttgcttatggtgacaatatatatagaatatatatattggcatc

SEQ ID NO: 22642 - DNA, 516 bp, synthetic construct
  source 1..516: mol_type = other DNA
tgtaacttagaagctgtacacaacgaccaacaggtaacattcatccagagtgttaaaggtcaagcacttctgtttccccggtcaaagttgatatgctccaacagggcaaaaacaactgcgatcgttatccgcagagcaactacgcaaagcttagtaccactttcaatggtgtatggctggtcgctccactataaacccaatagtagacctggcagatgaggctagaaactccccactggtaacagtgttctagcctgcgtggctgcctgcgtgcccttttgggcacgaagccttacatttgacaaggtgcgaagagccccgtgtgcttgctttgagtcctccggcccctgaatgtggctaaccttaaccctgcagctagtgtgtgcaatccagcacatggctagtcgtaatgagcaattgcgggatgggaccaactactttgggtgtccgtgtttcttgtttttcttttatatttgcttatggtgacaatatatatagaatatatatattggcatc

SEQ ID NO: 22643 - DNA, 566 bp, synthetic construct
  source 1..566: mol_type = other DNA
gctcttgtattccggtacatttgcacgccagtttgccacccctaccctctatgtaacttagaagcttacacaaagaccaataggcggtggtaaacccataccactaacggtcaaacacttctgtttccccggcatatgaggaataggctccaaaagggctgaagccactagtgtcgttatccgcattggtactacgcaaagcctagtatcggcctgaaaatttcttggttggtcgttcggccagttaccccactggtagacctggcagatgaggcaggacttaccccactggcgacagtggtcctgcctgcgtggctgcctgcacacccttatggggtgtgaagcctaggaacggacagggtgtgaagagccccgtgtgctaccaatgagtcctccggcccctgaatgcggctaatcttaccccgcagctgttgcacacaatccagtgtgtatgcagtcgtaatgagcaattgtgggatggaaccgactactttgggtgtccgtgtttccttgttttccttatatttgcttatggtgacaatattgatattatcagtgttgtcatc

SEQ ID NO: 22644 - DNA, 516 bp, synthetic construct
  source 1..516: mol_type = other DNA
atgtaacttagaagcttacacaaagaccaataggcggtggtaaacccataccactaacggtcaaacacttctgtttccccggcatatgaggaataggctccaaaagggctgaagccactagtgtcgttatccgcattggtactacgcaaagcctagtatcggcctgaaaatttcttggttggtcgttcggccagttaccccactggtagacctggcagatgaggcaggacttaccccactggcgacagtggtcctgcctgcgtggctgcctgcacacccttatggggtgtgaagcctaggaacggacagggtgtgaagagccccgtgtgctaccaatgagtcctccggcccctgaatgcggctaatcttaccccgcagctgttgcacacaatccagtgtgtatgcagtcgtaatgagcaattgtgggatggaaccgactactttgggtgtccgtgtttccttgttttccttatatttgcttatggtgacaatattgatattatcagtgttgtcatc

SEQ ID NO: 22645 - DNA, 567 bp, synthetic construct
  source 1..567: mol_type = other DNA
acactgttatttcggtaaccttgtacgccagttttataaccccctccccaaatgtaacttagaagctgtacacaacgaccaatagagggtaatcatccagattacttacggtcaagcacttctgtctccccggtttactttgatatgctccaacagggcaaaaacaaagtgaatcgttacccgcaagatgcctacgcaacgcctagtaacatcctgaattgtttatggttggtcgctcaattacaaccccagtaatagacctggcagatgaggctagatattccccactggcgacagtgatctagcctgcgtggctgcctgcacaccccttgtgggtgtgaagccataatcatgacagggtgcgaagagccacgtgtgctcatcttgagtcctccggcccctgaatgcggctaaccctaaccctgcagccattgcctacaaaccagtgggtatgtggtcgtaacgagaaattgcgggatgggaccgactactttgggtgtccgtgtttcactttttaccttatatttgcttatggtgacaatatatacgagtttatatattgacacc

SEQ ID NO: 22646 - DNA, 517 bp, synthetic construct
  source 1..517: mol_type = other DNA
aatgtaacttagaagctgtacacaacgaccaatagagggtaatcatccagattacttacggtcaagcacttctgtctccccggtttactttgatatgctccaacagggcaaaaacaaagtgaatcgttacccgcaagatgcctacgcaacgcctagtaacatcctgaattgtttatggttggtcgctcaattacaaccccagtaatagacctggcagatgaggctagatattccccactggcgacagtgatctagcctgcgtggctgcctgcacaccccttgtgggtgtgaagccataatcatgacagggtgcgaagagccacgtgtgctcatcttgagtcctccggcccctgaatgcggctaaccctaaccctgcagccattgcctacaaaccagtgggtatgtggtcgtaacgagaaattgcgggatgggaccgactactttgggtgtccgtgtttcactttttaccttatatttgcttatggtgacaatatatacgagtttatatattgacacc

SEQ ID NO: 22647 - DNA, 567 bp, synthetic construct
  source 1..567: mol_type = other DNA
cacttgtatcccggtacatttgtacgccagtttgcctccccttccctttatgtaacgtaagaagcctcagcacaatggccaacaggtggtaacaatccatgttacctacggtcaagcacttctgtctccccggtacgaagagtgttaagtcttacccaagaccgaagctttgagtatcgttatccgcataactactggacaaagcccagtaacaccccacgatgtaggatggttggtcgttccaccagtgtaaccccctggtagacctggcagatgaggctagagtttccccactggtgacagtgttctagcctgcgtggctgcctgctcccttatgggagaagccattctattgacaaggtgtgaagagccccgtgcgctagttatgagtcctccggcccctgaatgcggctaatccaaccctgcagccattgcatggaaaccaccatgtagatggtcgtaatgagcaattgcgggacggaaccgactactttgggtgtccgtgtttcttgtttttcttatcaattgcttatggtgacaatatatacagctaatatattgttcacc

SEQ ID NO: 22648 - DNA, 517 bp, synthetic construct
  source 1..517: mol_type = other DNA
tgtaacgtaagaagcctcagcacaatggccaacaggtggtaacaatccatgttacctacggtcaagcacttctgtctccccggtacgaagagtgttaagtcttacccaagaccgaagctttgagtatcgttatccgcataactactggacaaagcccagtaacaccccacgatgtaggatggttggtcgttccaccagtgtaaccccctggtagacctggcagatgaggctagagtttccccactggtgacagtgttctagcctgcgtggctgcctgctcccttatgggagaagccattctattgacaaggtgtgaagagccccgtgcgctagttatgagtcctccggcccctgaatgcggctaatccaaccctgcagccattgcatggaaaccaccatgtagatggtcgtaatgagcaattgcgggacggaaccgactactttgggtgtccgtgtttcttgtttttcttatcaattgcttatggtgacaatatatacagctaatatattgttcacc

SEQ ID NO: 22649 - DNA, 567 bp, synthetic construct
  source 1..567: mol_type = other DNA
actcttgtattccggtacacttgtacgccagttttataaccccttcccctttgcaacttagaagaaagtaaacactggccaataggaaatagcaaaccacgctatttacggtcaagcacttctgtttccccggtctgacgggatatgcttcacccgaggcagaaactcagatgatcgttatccgcaaagtgcctacgggaagcctagtagcactttggaagttgttgggctggtcgctcaattgctgaccccgagcaatagacttggcagatgaggctggacgtgccccaccagtgatggtggtccagcctgcgtggctgcctactcaccctaacagggtgagaagcctatcaatagacaaggtgtgaagagcctactgtgctcactttgattcctccggcccctgaatgtggctaatcctaaccccgtatctatcgcatgcacaccagcatgtaggtagtcgtaatgggcaactacgggacggaaccaactactttgggtgtccgtgtttccttgttcttttattacttgcgtatggtgacaattgtatgaaatacgattgacacc

SEQ ID NO: 22650 - DNA, 517 bp, synthetic construct
  source 1..517: mol_type = other DNA
ttgcaacttagaagaaagtaaacactggccaataggaaatagcaaaccacgctatttacggtcaagcacttctgtttccccggtctgacgggatatgcttcacccgaggcagaaactcagatgatcgttatccgcaaagtgcctacgggaagcctagtagcactttggaagttgttgggctggtcgctcaattgctgaccccgagcaatagacttggcagatgaggctggacgtgccccaccagtgatggtggtccagcctgcgtggctgcctactcaccctaacagggtgagaagcctatcaatagacaaggtgtgaagagcctactgtgctcactttgattcctccggcccctgaatgtggctaatcctaaccccgtatctatcgcatgcacaccagcatgtaggtagtcgtaatgggcaactacgggacggaaccaactactttgggtgtccgtgtttccttgttcttttattacttgcgtatggtgacaattgtatgaaatacgattgacacc

SEQ ID NO: 22651 - DNA, 568 bp, synthetic construct
  source 1..568: mol_type = other DNA
actctgttattacggtaactttgtacgccagtttttcccacccttccccataatgtaacttagaagtttgtacaatatgaccaataggtgacaatcatccagactgtcaaaggtcaagcacttctgtttccccggtcaatgaggatatgctttacccaaggcaaaaaccttagagatcgttatccccacactgcctacacagagcccagtaccatttttgatataattgggttggtcgctccctgcaaacccagcagtagacctggcagatgaggctggacattccccactggcgacagtggtccagcctgcgtggctgcctgctcacccttcttgggtgagaagcctaattattgacaaggtgtgaagagccgcgtgtgctcagtgtgcttcctccggcccctgaatgtggctaaccttaaccctgcagccgttgcccataatccaatgggtttgcggtcgtaatgcgtaagtgcgggatgggaccaactactttgggtgtccgtgtttcctgtttttcttttgattgcattttatggtgacaatttatagtgtatagattgtcatc

SEQ ID NO: 22652 - DNA, 518 bp, synthetic construct
  source 1..518: mol_type = other DNA
taatgtaacttagaagtttgtacaatatgaccaataggtgacaatcatccagactgtcaaaggtcaagcacttctgtttccccggtcaatgaggatatgctttacccaaggcaaaaaccttagagatcgttatccccacactgcctacacagagcccagtaccatttttgatataattgggttggtcgctccctgcaaacccagcagtagacctggcagatgaggctggacattccccactggcgacagtggtccagcctgcgtggctgcctgctcacccttcttgggtgagaagcctaattattgacaaggtgtgaagagccgcgtgtgctcagtgtgcttcctccggcccctgaatgtggctaaccttaaccctgcagccgttgcccataatccaatgggtttgcggtcgtaatgcgtaagtgcgggatgggaccaactactttgggtgtccgtgtttcctgtttttcttttgattgcattttatggtgacaatttatagtgtatagattgtcatc

SEQ ID NO: 22653 - DNA, 568 bp, synthetic construct
  source 1..568: mol_type = other DNA
acactattattccggtaattttgtacgccagttttatctccccaccccccttttgtaatttagaagttatgaacacagaccaataggtggcaactagccaagttgttaaaggtcaagcacttctgtctccccggctgacgttgatatgctccaacagggcaaaaacaatgaaagtcgttatccgcaaagtgcctacgcaaagcctagtaacactttgaaatgtctatggttggtcgctcagctattccccatagtagacctggcagatgaggctagaaataccccactggtaacagtgttctagcctgcgtggctgcctgcgcaccctccccgggtgcgaagccatatatatgacaaggtgcgaagagccccgtgtgctcactttgaatcctccggctcctgaatgtggctaaccttaaccccgcagccagtgcacataagccaatgtgtggctggtcgtaatgagcaattgtgggatgggaccaactactttggatgtccgtgtttcctgtttttcttttattcttgcttatggtgacaatatatatagtttatatatattggcatc

SEQ ID NO: 22654 - DNA, 518 bp, synthetic construct
  source 1..518: mol_type = other DNA
ttttgtaatttagaagttatgaacacagaccaataggtggcaactagccaagttgttaaaggtcaagcacttctgtctccccggctgacgttgatatgctccaacagggcaaaaacaatgaaagtcgttatccgcaaagtgcctacgcaaagcctagtaacactttgaaatgtctatggttggtcgctcagctattccccatagtagacctggcagatgaggctagaaataccccactggtaacagtgttctagcctgcgtggctgcctgcgcaccctccccgggtgcgaagccatatatatgacaaggtgcgaagagccccgtgtgctcactttgaatcctccggctcctgaatgtggctaaccttaaccccgcagccagtgcacataagccaatgtgtggctggtcgtaatgagcaattgtgggatgggaccaactactttggatgtccgtgtttcctgtttttcttttattcttgcttatggtgacaatatatatagtttatatatattggcatc

SEQ ID NO: 22655 - DNA, 568 bp, synthetic construct
  source 1..568: mol_type = other DNA
gctcttgtatttcggtacgtttgcacgccagtttgctaccccttcccttttacgtaacttagaagtttacacaaagaccaataggcggtggtaaatccataccactaacggtcaaatacttctgtttccccggcatgcgaggaataggctccaaaagggctgaagccactagtgtcgttatccgcattggtactacgcaaagcctagtattaccttgaaaatttcttggctggtcgctccaccagataccccactggtagacctggcagatgaggcaggacttaccccactggcgacagtggtcctgcctgcgtggctgcctgcacaccccttacggggtgtgaagcccagaaacagacaaggtgtgaagagccccgtgtgctactagtgagtcctccggcccctgaatgcggctaatcttaccccacagctgttgcacgcaaaccagcgtgtatgcagtcgtaatgagcaattgtgggatggaaccgactactttgggtgtccgtgtttctttttattcctattatttgcttatggtgacaatattgatattatcagtgttgtcatc

SEQ ID NO: 22656 - DNA, 518 bp, synthetic construct
  source 1..518: mol_type = other DNA
tacgtaacttagaagtttacacaaagaccaataggcggtggtaaatccataccactaacggtcaaatacttctgtttccccggcatgcgaggaataggctccaaaagggctgaagccactagtgtcgttatccgcattggtactacgcaaagcctagtattaccttgaaaatttcttggctggtcgctccaccagataccccactggtagacctggcagatgaggcaggacttaccccactggcgacagtggtcctgcctgcgtggctgcctgcacaccccttacggggtgtgaagcccagaaacagacaaggtgtgaagagccccgtgtgctactagtgagtcctccggcccctgaatgcggctaatcttaccccacagctgttgcacgcaaaccagcgtgtatgcagtcgtaatgagcaattgtgggatggaaccgactactttgggtgtccgtgtttctttttattcctattatttgcttatggtgacaatattgatattatcagtgttgtcatc

SEQ ID NO: 22657 - DNA, 569 bp, synthetic construct
  source 1..569: mol_type = other DNA
acactgttattccggtaactttgtacgccagttttgaactccccttaccccttttgtaacttagaagttaaacaaaccgaccgatagcaggcaatcacccagattgcttatggtcaagcacttctgtctccccggtctcctttgatatgctccaccagggcaaaaacagagtagatcgttatccgcaagatgcctacgcaacgcctagtagcattttgaagtaattttggctggtcgctcatttacaaccccagtaatagacctggcagatgaggctagatactccccactggtgacagtgatctagcctgcgtggctgcctgcacaccctttccgggtgtgaagccaaacttatgacaaggtgtgaagagccacgtgtgctcatcttgagtcctccggcccctgaatgcggctaaccttaaccctgcagccattgcctacaagccagtgggtatgtggtcgtaatgagaaattgcgggatgggaccgactactttgggtgtccgtgtttcactttttaccttatatttgcttatggtgacaatatatatatagatatatattgacacc

SEQ ID NO: 22658 - DNA, 519 bp, synthetic construct
  source 1..519: mol_type = other DNA
cttttgtaacttagaagttaaacaaaccgaccgatagcaggcaatcacccagattgcttatggtcaagcacttctgtctccccggtctcctttgatatgctccaccagggcaaaaacagagtagatcgttatccgcaagatgcctacgcaacgcctagtagcattttgaagtaattttggctggtcgctcatttacaaccccagtaatagacctggcagatgaggctagatactccccactggtgacagtgatctagcctgcgtggctgcctgcacaccctttccgggtgtgaagccaaacttatgacaaggtgtgaagagccacgtgtgctcatcttgagtcctccggcccctgaatgcggctaaccttaaccctgcagccattgcctacaagccagtgggtatgtggtcgtaatgagaaattgcgggatgggaccgactactttgggtgtccgtgtttcactttttaccttatatttgcttatggtgacaatatatatatagatatatattgacacc

SEQ ID NO: 22659 - DNA, 570 bp, synthetic construct
  source 1..570: mol_type = other DNA
ctggtactttgtacctttgtacgcctgtttctccctcccttcccaacctaaacaatccttgtaacttagaaggtttcgattatcgcacaatagggactattgcaaccagcaatagtcagtgcaagcacttctgtttccccggagcggagtgtagatggccaccgctgtcaaaagctcttaaccgttatccgccagttaactacgcaacggctagtagtgccttgttgcttttatggcgttcgatcaggcgagatttaccccctcgctagtctggtcgatgaggctgagaattccccacgggcgaccgtgtctcagcctgcgtggcggccagcccagcctttgctgggacgccttgattgcgacatggtgtgaagacccgcgtgtgcttaactgtgagtcctccggcccctgaatgcggctaacctaaaccctggagccttgaaacacaacccagtgttcgcaaggtcgtaacgagcaattccgggacgggaccgactactttgggtgtccgtgtttcctttattctttcaattgttcttatggtcacaatataagtgttatattgtgatc

SEQ ID NO: 22660 - DNA, 520 bp, synthetic construct
  source 1..520: mol_type = other DNA
aacaatccttgtaacttagaaggtttcgattatcgcacaatagggactattgcaaccagcaatagtcagtgcaagcacttctgtttccccggagcggagtgtagatggccaccgctgtcaaaagctcttaaccgttatccgccagttaactacgcaacggctagtagtgccttgttgcttttatggcgttcgatcaggcgagatttaccccctcgctagtctggtcgatgaggctgagaattccccacgggcgaccgtgtctcagcctgcgtggcggccagcccagcctttgctgggacgccttgattgcgacatggtgtgaagacccgcgtgtgcttaactgtgagtcctccggcccctgaatgcggctaacctaaaccctggagccttgaaacacaacccagtgttcgcaaggtcgtaacgagcaattccgggacgggaccgactactttgggtgtccgtgtttcctttattctttcaattgttcttatggtcacaatataagtgttatattgtgatc

SEQ ID NO: 22661 - DNA, 570 bp, synthetic construct
  source 1..570: mol_type = other DNA
acactgttattacggtaactttgtatgccagtttttgttcccctatccccctttaaagtaacttagaagcatgaacttacagaccaaaaggtgatgatcacccagatcattaaaggtcaagcacttctgtttccccggtcaatgttgatatgcttcaacaaggcaaaaacaacagcgatcgttatccgcaagatgcctacacaaagcttagtacctcctttgatggtatttgtctggtcgctcaggtgtttccccaacactagacctggcagatgaggctagaaactccccactggcgacagtgttctagcctgcgtggctgcctgcacaccctttcgggtgtgaagccaaatactggacaaggtgcgaagagccccgtgtgctcatcttgagtcctccggcccctgaatgcggctaaccttaaacccgcagccattactcacaatccagtgagcagatggtcgtaatgagcaattgtgggatgggaccgactactttgggtgtccgtgtttcatgttttactttatgacttgcttatggtgacaatatatagagatatatattggcatc

SEQ ID NO: 22662 - DNA, 520 bp, synthetic construct
  source 1..520: mol_type = other DNA
ctttaaagtaacttagaagcatgaacttacagaccaaaaggtgatgatcacccagatcattaaaggtcaagcacttctgtttccccggtcaatgttgatatgcttcaacaaggcaaaaacaacagcgatcgttatccgcaagatgcctacacaaagcttagtacctcctttgatggtatttgtctggtcgctcaggtgtttccccaacactagacctggcagatgaggctagaaactccccactggcgacagtgttctagcctgcgtggctgcctgcacaccctttcgggtgtgaagccaaatactggacaaggtgcgaagagccccgtgtgctcatcttgagtcctccggcccctgaatgcggctaaccttaaacccgcagccattactcacaatccagtgagcagatggtcgtaatgagcaattgtgggatgggaccgactactttgggtgtccgtgtttcatgttttactttatgacttgcttatggtgacaatatatagagatatatattggcatc

SEQ ID NO: 22663 - DNA, 570 bp, synthetic construct
  source 1..570: mol_type = other DNA
tactcttgtattccggtacacttgtacgcccagtttgccaccctaaacaccccgtaacaatagaagtctacgcacacttagaccaatagggggtgttcatccagttcacccaaggtcaagcacttctgtttccccggcataggggtgttaggcttcgcccgaggccaaagctctgattgtcgttatccgcacaactactggacaaagcctagtagcaccctacgatgtagcatggttggttgttccgccagtatcccctggtaaacctggcagatggggctagaagttcctcactggcgacagtgttctagcccgcgtggctgcctgctcccttatgggagaagccattctactgacaaggtgtgaagagccccgtacgctagttgtgattcctccggcccctgaatgcggctaatccaaccctgcagccattacatggaagccaccatgtggatggtcgtaatgagtaattgcgggacggaaccgactactttgggtgtccgtgtttcttgtttttcttttactgacgtttatggtgacaatatatatataacgtatatattgttcatc

SEQ ID NO: 22664 - DNA, 520 bp, synthetic construct
  source 1..520: mol_type = other DNA
cccgtaacaatagaagtctacgcacacttagaccaatagggggtgttcatccagttcacccaaggtcaagcacttctgtttccccggcataggggtgttaggcttcgcccgaggccaaagctctgattgtcgttatccgcacaactactggacaaagcctagtagcaccctacgatgtagcatggttggttgttccgccagtatcccctggtaaacctggcagatggggctagaagttcctcactggcgacagtgttctagcccgcgtggctgcctgctcccttatgggagaagccattctactgacaaggtgtgaagagccccgtacgctagttgtgattcctccggcccctgaatgcggctaatccaaccctgcagccattacatggaagccaccatgtggatggtcgtaatgagtaattgcgggacggaaccgactactttgggtgtccgtgtttcttgtttttcttttactgacgtttatggtgacaatatatatataacgtatatattgttcatc

SEQ ID NO: 22665 - DNA, 571 bp, synthetic construct
  source 1..571: mol_type = other DNA
ctctcatatcacggtatgtttgtacgccagtttgcctcccctcccaagtgtaacttagaagtttgtactttataaaggccaataggcgggtagtcaaccacactactcatggtcaagcacttctgtttccccggtatgcgaagaataagctttaacaaaggctgaagcttcaattatcgttatccgcatgataactacgcaaagcttagtagcattttgaaagtttattggttggtcgctccactggaaaacccccccagtagacctggcagatgaggctaagtaatccccactggcgacagtgacttagcctgcgtggctgcctgcacacctggagacaggtgtgaagccaagtaatggacaaggtgtgaagagccccgtgtgcttatcatgagtcctccggcccctgaatgcggctaatccaaccccacagctattgcacataatccaatgtgtatttagtcgtaacgggcaactgtgggacggaaccgactactttgggtgtccgtgtttcctttattctcatttaagtttcctatggtgacaaatataagtgattatatctgtcatc

SEQ ID NO: 22666 - DNA, 521 bp, synthetic construct
  source 1..521: mol_type = other DNA
taacttagaagtttgtactttataaaggccaataggcgggtagtcaaccacactactcatggtcaagcacttctgtttccccggtatgcgaagaataagctttaacaaaggctgaagcttcaattatcgttatccgcatgataactacgcaaagcttagtagcattttgaaagtttattggttggtcgctccactggaaaacccccccagtagacctggcagatgaggctaagtaatccccactggcgacagtgacttagcctgcgtggctgcctgcacacctggagacaggtgtgaagccaagtaatggacaaggtgtgaagagccccgtgtgcttatcatgagtcctccggcccctgaatgcggctaatccaaccccacagctattgcacataatccaatgtgtatttagtcgtaacgggcaactgtgggacggaaccgactactttgggtgtccgtgtttcctttattctcatttaagtttcctatggtgacaaatataagtgattatatctgtcatc

SEQ ID NO: 22667 - DNA, 572 bp, synthetic construct
  source 1..572: mol_type = other DNA
ctggtactctgtacctttgtacgcctgtttatccactacccttttcctaaattttccacccgtgtaaccttagaagcaaacaaattgtacaatagggtgcatcacaaccagtgatgtacagtacaagcacttctgtttccccggagcggggtatagacggtcaccactgtcaaaagcccttaaccgttacccgccaaccaactacgtaacggctagtaacaccatgaatttgtcttgacgttcgatcaggtggtaaccccccactagtttggtcgatgaggctgagaactccccacgggtaaccgtgtctcagcctgcgtggcggccaacccagcttctgctgggacgccaattcattgacatggtgtgaagacctgcatgtgcttggttgtgattcctccggcccctgaatgcggctaaccctaaccccggagccacgcggcataatccaatgtcgtatgggtcgtaatgagtaattctgggatgggaccgactactttgggtgtccgtgtttcctgtttttccaaattattcttatggtcacagcatataaatagatatatactgtgatc

SEQ ID NO: 22668 - DNA, 522 bp, synthetic construct
  source 1..522: mol_type = other DNA
attttccacccgtgtaaccttagaagcaaacaaattgtacaatagggtgcatcacaaccagtgatgtacagtacaagcacttctgtttccccggagcggggtatagacggtcaccactgtcaaaagcccttaaccgttacccgccaaccaactacgtaacggctagtaacaccatgaatttgtcttgacgttcgatcaggtggtaaccccccactagtttggtcgatgaggctgagaactccccacgggtaaccgtgtctcagcctgcgtggcggccaacccagcttctgctgggacgccaattcattgacatggtgtgaagacctgcatgtgcttggttgtgattcctccggcccctgaatgcggctaaccctaaccccggagccacgcggcataatccaatgtcgtatgggtcgtaatgagtaattctgggatgggaccgactactttgggtgtccgtgtttcctgtttttccaaattattcttatggtcacagcatataaatagatatatactgtgatc

SEQ ID NO: 22669 - DNA, 572 bp, synthetic construct
  source 1..572: mol_type = other DNA
ctggtactctgtacctttgtacgcctgtttctcctcaaccctcccctacccgttatatatctcagtaacttagaagatatcattaccgcacaatagggaccgttgtaaccagcaacggtcagtgcaagcacttctgtttccccggagcggagtatagacggccactgctgtcaaaagctcttaaccgttacccgccagttaactacacaacagctagtaacatcttgttgttcttagggcgttcgatcaggtgagtttaccccctcactagtctggtcgatgaggctgagaaatccccacgggtgaccgtgtctcagcctgcgtggcggccagcccagcttatgctgggacgccttaagtatgacatggtgtgaagactcgcgtgtgcttagctgtgagtcctccggcccctgaatgcggctaacctaaaccccggagccttgaggcacaatccagtgcccgcgaggtcgtaacgagaaattctgggacgggaccgactactttgggtgtccgtgtttccttttatctttttgatgttcttatggttacaatatataaagtatattgtaatc

SEQ ID NO: 22670 - DNA, 522 bp, synthetic construct
  source 1..522: mol_type = other DNA
cgttatatatctcagtaacttagaagatatcattaccgcacaatagggaccgttgtaaccagcaacggtcagtgcaagcacttctgtttccccggagcggagtatagacggccactgctgtcaaaagctcttaaccgttacccgccagttaactacacaacagctagtaacatcttgttgttcttagggcgttcgatcaggtgagtttaccccctcactagtctggtcgatgaggctgagaaatccccacgggtgaccgtgtctcagcctgcgtggcggccagcccagcttatgctgggacgccttaagtatgacatggtgtgaagactcgcgtgtgcttagctgtgagtcctccggcccctgaatgcggctaacctaaaccccggagccttgaggcacaatccagtgcccgcgaggtcgtaacgagaaattctgggacgggaccgactactttgggtgtccgtgtttccttttatctttttgatgttcttatggttacaatatataaagtatattgtaatc

SEQ ID NO: 22671 - DNA, 573 bp, synthetic construct
  source 1..573: mol_type = other DNA
ggtactttgtacctttgtacgcctgttcttcccattgtaccctcccttaacttccaacccaagcaacattagaagttatcaattttcagtacaataggaagcatcacatccagtgatgttgtgtacaagcacttctgtctccccggagcgaggtataagcagtacccactgctaaaagcctttaaccgttacccgccaatcaactacgtaacagctagtatcatcatgtttttgactggacgttcgatcaggtggttcccccccactagtttggtcgatgaggctaggaataccccacgggtaaccgtgtcctagcctgcgtggcggccaacccagcatttgctgggacgcccttttaaagacatggtgtgaagactcgcatgtgcttgattgtgattcctccggcccctgaatgcggctaaccttaaccccggagccttgtgttgcaatccagcaaaagcaaggtcgtaatgagcaattctgggacgggaccgactactttgggtgtccgtgtttctcattttacattacttttcttatggtcacagcatatataataaatatactgtgatc

SEQ ID NO: 22672 - DNA, 523 bp, synthetic construct
  source 1..523: mol_type = other DNA
cttccaacccaagcaacattagaagttatcaattttcagtacaataggaagcatcacatccagtgatgttgtgtacaagcacttctgtctccccggagcgaggtataagcagtacccactgctaaaagcctttaaccgttacccgccaatcaactacgtaacagctagtatcatcatgtttttgactggacgttcgatcaggtggttcccccccactagtttggtcgatgaggctaggaataccccacgggtaaccgtgtcctagcctgcgtggcggccaacccagcatttgctgggacgcccttttaaagacatggtgtgaagactcgcatgtgcttgattgtgattcctccggcccctgaatgcggctaaccttaaccccggagccttgtgttgcaatccagcaaaagcaaggtcgtaatgagcaattctgggacgggaccgactactttgggtgtccgtgtttctcattttacattacttttcttatggtcacagcatatataataaatatactgtgatc

SEQ ID NO: 22673 - DNA, 573 bp, synthetic construct
  source 1..573: mol_type = other DNA
ctctcatattacggtatgcttgcacgccagtttgtttcccctttccccttttgtaactatagaagattgcacttaatctcgaccaataggcagtagtgatccacactacttacggtcaagcacttctgttaccccggtatgcggagaataggctctgaaaagggctgaagcttcaattatcgtcatccgcgcaattactacgcaaagcttagtaacttcccaagaaattctttggttggccgttccgctggtaccccaccagtaggcttggcagatgaggctgagtaatccccactggcgacagtgactcagcctgcgtggctgcctacacacctggtaacaggtgtgaagccatagaaaggacagggtgtgaagagccccgtgtgctaattgtgattcctccggcccctgaatgcggctaatctaaccccacatccaatgcgcataagccaatgcgtatttggtcgtaatgggcaactgtgggacggaaccgactactttgggtgtccgtgtttctttttattccttataattagttcatggtgacaagtataagtgtttatatttgtcatc

SEQ ID NO: 22674 - DNA, 523 bp, synthetic construct
  source 1..523: mol_type = other DNA
ttgtaactatagaagattgcacttaatctcgaccaataggcagtagtgatccacactacttacggtcaagcacttctgttaccccggtatgcggagaataggctctgaaaagggctgaagcttcaattatcgtcatccgcgcaattactacgcaaagcttagtaacttcccaagaaattctttggttggccgttccgctggtaccccaccagtaggcttggcagatgaggctgagtaatccccactggcgacagtgactcagcctgcgtggctgcctacacacctggtaacaggtgtgaagccatagaaaggacagggtgtgaagagccccgtgtgctaattgtgattcctccggcccctgaatgcggctaatctaaccccacatccaatgcgcataagccaatgcgtatttggtcgtaatgggcaactgtgggacggaaccgactactttgggtgtccgtgtttctttttattccttataattagttcatggtgacaagtataagtgtttatatttgtcatc

SEQ ID NO: 22675 - DNA, 574 bp, synthetic construct
  source 1..574: mol_type = other DNA
ctggtattgtgtacctttgtacgcctgttttccccaaatcccctaccctttatatctcctaccccgtaacgtaagaagttttcaaacagtacaataggaagcaccacatccagtggtgttatgtacaagcacttctgtttccccggagcgaggtataggtggtcaccaccgccaaaagcctttaaccgttacccgccaaccaactacgtaatggctagtaacatcattgatttagattggcgttcgatcaggtggtatccccccactagtttggtcgatgaggctaggaataccccacgggtgaccgtgtcctagcctgcgtggcggccaacccagcatacgctgggacgccagtttactgacatggtgcgaagacttgcatgtgcttggttgagagtcctccggcccctgaatgcggctaaccttaaccccggagcctcgcagcataatccaatgttgtagaggtcgtaacgagtaattctgggatgggaccgactactttgggtgtccgtgtttcctgtttttctttaaaatgtcttatggtcacagcatatatactgtatatactgtgatc

SEQ ID NO: 22676 - DNA, 524 bp, synthetic construct
  source 1..524: mol_type = other DNA
tatatctcctaccccgtaacgtaagaagttttcaaacagtacaataggaagcaccacatccagtggtgttatgtacaagcacttctgtttccccggagcgaggtataggtggtcaccaccgccaaaagcctttaaccgttacccgccaaccaactacgtaatggctagtaacatcattgatttagattggcgttcgatcaggtggtatccccccactagtttggtcgatgaggctaggaataccccacgggtgaccgtgtcctagcctgcgtggcggccaacccagcatacgctgggacgccagtttactgacatggtgcgaagacttgcatgtgcttggttgagagtcctccggcccctgaatgcggctaaccttaaccccggagcctcgcagcataatccaatgttgtagaggtcgtaacgagtaattctgggatgggaccgactactttgggtgtccgtgtttcctgtttttctttaaaatgtcttatggtcacagcatatatactgtatatactgtgatc

SEQ ID NO: 22677 - DNA, 574 bp, synthetic construct
  source 1..574: mol_type = other DNA
actctgtacctttgtacgcctgtttctccccttgcaccctccctcattatcctaacccttgtaacattagaagatgagcaacccgtgcaataggagataccacaaccagtggtgttaagcacaagtacttctgtttccccggagcggagtatagacggtccccactgtcaaaagctcttaaccgttatccgccaaccaactacgtgacgactagtagcatcattttgacactttgacgttcgatcaggtaggttcaccccacctactagtttggtcgatgaggctgggagtccctcacaggtaactgtgtcccagcctgcgtggcggccaacccagcaattgctgggacgccaatttgttgacatggtgtgaagatcctaatgtgcttggttgtgagtcctccggcccctgaatgcggctaaccttaaccccggagccttgtggcacaagccagtgacattaaggtcgtaaggagcaattctgggatgggaccgactactttgggtgtccgtgtttcctatttttctttaaattgtcttatggtcacagcatatattaattatatactgtgatc

SEQ ID NO: 22678 - DNA, 524 bp, synthetic construct
  source 1..524: mol_type = other DNA
cctaacccttgtaacattagaagatgagcaacccgtgcaataggagataccacaaccagtggtgttaagcacaagtacttctgtttccccggagcggagtatagacggtccccactgtcaaaagctcttaaccgttatccgccaaccaactacgtgacgactagtagcatcattttgacactttgacgttcgatcaggtaggttcaccccacctactagtttggtcgatgaggctgggagtccctcacaggtaactgtgtcccagcctgcgtggcggccaacccagcaattgctgggacgccaatttgttgacatggtgtgaagatcctaatgtgcttggttgtgagtcctccggcccctgaatgcggctaaccttaaccccggagccttgtggcacaagccagtgacattaaggtcgtaaggagcaattctgggatgggaccgactactttgggtgtccgtgtttcctatttttctttaaattgtcttatggtcacagcatatattaattatatactgtgatc

SEQ ID NO: 22679 - DNA, 575 bp, synthetic construct
  source 1..575: mol_type = other DNA
ctggtattttgtacctttgcacgcctgtttcccatttgtacccttccttaatctccttcccccgtaacgttagaagttttggaattttaaagtacaataggaagcgccacatccagtggtgttgcgtacaaatacttctgtttacccggagcgaggtataggttgtacccacggccaaaagcctttaaccgttatccgccaatcaactacgtaacggctagtatcatcttgcttttgatttggtgttcgatcaggtggtatcccccactagtctggtcgatgaggctaggaattccccacgggcgaccgtgtcctagcctgcgtggcggccagcccagcttttgctgggacgccttttcaaagacatggtgtgaagacctgcatgtgcttggttgtgagtcctccggcccctgaatgcggctaaccttaaccctggagcccagcagcataatccaatgttgtttgggtcgtaatgagcaattccgggacgggaccgactactttgggtgtccgtgtttccttttattcttacattgtcttatggtcacagcatatatattatatatactgtgatc

SEQ ID NO: 22680 - DNA, 525 bp, synthetic construct
  source 1..525: mol_type = other DNA
atctccttcccccgtaacgttagaagttttggaattttaaagtacaataggaagcgccacatccagtggtgttgcgtacaaatacttctgtttacccggagcgaggtataggttgtacccacggccaaaagcctttaaccgttatccgccaatcaactacgtaacggctagtatcatcttgcttttgatttggtgttcgatcaggtggtatcccccactagtctggtcgatgaggctaggaattccccacgggcgaccgtgtcctagcctgcgtggcggccagcccagcttttgctgggacgccttttcaaagacatggtgtgaagacctgcatgtgcttggttgtgagtcctccggcccctgaatgcggctaaccttaaccctggagcccagcagcataatccaatgttgtttgggtcgtaatgagcaattccgggacgggaccgactactttgggtgtccgtgtttccttttattcttacattgtcttatggtcacagcatatatattatatatactgtgatc

SEQ ID NO: 22681 - DNA, 575 bp, synthetic construct
  source 1..575: mol_type = other DNA
ctggtattttgtacctttgcacgcctgtttcccctttgtacccatcctgaatttcctccctctgcaacgttagaagtttgtgaaattaaaagtacaataggaagcatcacatccagtggtgttcagtacaagcactcctgtttccccggagcgaggtataggttgtacccacgaccgaaagcctttaaccgttatccgccaatcaactacataacggctagtatcatcatgtttttgatctggcgttcgatcaggtggtttcccccactagtctggtcgatgaggctaggatttccccacgggcgaccgtgtcctagcctgcgtggcggccagcccagcttatgctgggacgcctttttaaagacatggtgtgaagacctgcatgtgcttgattgtgagtcctccggcccctgaatgcggctaaccttaaccctggagcccgacagcataatccaatgttgtttgggtcgtaatgagcaattccgggatgggaccgactactttgggtgtccgtgtttctttttattcttatattgtcttatggtcacagcatatatagtatatatactgtgatc

SEQ ID NO: 22682 - DNA, 525 bp, synthetic construct
  source 1..525: mol_type = other DNA
atttcctccctctgcaacgttagaagtttgtgaaattaaaagtacaataggaagcatcacatccagtggtgttcagtacaagcactcctgtttccccggagcgaggtataggttgtacccacgaccgaaagcctttaaccgttatccgccaatcaactacataacggctagtatcatcatgtttttgatctggcgttcgatcaggtggtttcccccactagtctggtcgatgaggctaggatttccccacgggcgaccgtgtcctagcctgcgtggcggccagcccagcttatgctgggacgcctttttaaagacatggtgtgaagacctgcatgtgcttgattgtgagtcctccggcccctgaatgcggctaaccttaaccctggagcccgacagcataatccaatgttgtttgggtcgtaatgagcaattccgggatgggaccgactactttgggtgtccgtgtttctttttattcttatattgtcttatggtcacagcatatatagtatatatactgtgatc

SEQ ID NO: 22683 - DNA, 575 bp, synthetic construct
  source 1..575: mol_type = other DNA
ctctcatattccggtatgtttgcacgccagtttgcctctccttttcccacgtaacgttagaagcttatgcactaaatcgaccactaggtgagtgataaaccatatcattctttggtcaagcacttctgtttccccggtatgcagggaataggccctccccagggctgaagccttaattatcgttatccgcacatttactacgcaaagcctattagcgttctggaagttcactggctggtcgttccgctagactaacccgtctagtagacctggcagatgaggctggataaaccccactggcgacagtgatccagcctgcgtggctgcctgcacacctggaaacaggtgtgaagcccatgaatggacagggtgtgaagagccccgtgtgctaagtgtgagtcctccggcccctgaatgcggctaatctaaccccacagctaatacacacaaaccagtgtggatttagtcgtaatgggtaactgtgggacggaaccgactactttgggtgtccgtgtttccttttattccttttatattgcttatggtgacaggtatatagatatatatttgttacc

SEQ ID NO: 22684 - DNA, 525 bp, synthetic construct
  source 1..525: mol_type = other DNA
gtaacgttagaagcttatgcactaaatcgaccactaggtgagtgataaaccatatcattctttggtcaagcacttctgtttccccggtatgcagggaataggccctccccagggctgaagccttaattatcgttatccgcacatttactacgcaaagcctattagcgttctggaagttcactggctggtcgttccgctagactaacccgtctagtagacctggcagatgaggctggataaaccccactggcgacagtgatccagcctgcgtggctgcctgcacacctggaaacaggtgtgaagcccatgaatggacagggtgtgaagagccccgtgtgctaagtgtgagtcctccggcccctgaatgcggctaatctaaccccacagctaatacacacaaaccagtgtggatttagtcgtaatgggtaactgtgggacggaaccgactactttgggtgtccgtgtttccttttattccttttatattgcttatggtgacaggtatatagatatatatttgttacc

SEQ ID NO: 22685 - DNA, 575 bp, synthetic construct
  source 1..575: mol_type = other DNA
gctcctgtattacggtacacttgcacgccagtttgcctccctacccccttcccattcacacccaaccctgcgtaacttagaagctatgcacaagaccaataggtggtaacaatccatgttactaaaggtcaagtacttctgtttccccggcatgcgtggaataaacagtgcaaacggttgaggccacaaatgtcgttacccgcgcatgaactacgcagagcctagtatccccctgaaagtccattggttggtcgctcagctaatccccatagtagacctggcagatgaggcaagacgcaccccactggcgacagtggtcttgcctgcgtggctgcctgcacacccttcggggtgtgaagccaattgatagacagggtgtgaagagccgagtgtgcttcatgtgagtcctccggcccctgaatgcggctaatccaaccccgcagctgtggcacacaatccagtgtgtatgcagtcgtaacgggcaactgcgggacggaaccgactactttgggtgtccgtgtttccttttattctttaatcaagtacttatggtgacaataataaatattgttacc

SEQ ID NO: 22686 - DNA, 525 bp, synthetic construct
  source 1..525: mol_type = other DNA
cccattcacacccaaccctgcgtaacttagaagctatgcacaagaccaataggtggtaacaatccatgttactaaaggtcaagtacttctgtttccccggcatgcgtggaataaacagtgcaaacggttgaggccacaaatgtcgttacccgcgcatgaactacgcagagcctagtatccccctgaaagtccattggttggtcgctcagctaatccccatagtagacctggcagatgaggcaagacgcaccccactggcgacagtggtcttgcctgcgtggctgcctgcacacccttcggggtgtgaagccaattgatagacagggtgtgaagagccgagtgtgcttcatgtgagtcctccggcccctgaatgcggctaatccaaccccgcagctgtggcacacaatccagtgtgtatgcagtcgtaacgggcaactgcgggacggaaccgactactttgggtgtccgtgtttccttttattctttaatcaagtacttatggtgacaataataaatattgttacc

SEQ ID NO: 22687 - DNA, 576 bp, synthetic construct
  source 1..576: mol_type = other DNA
ctggtattttgtacctttgtacgcctgtttcttccctttgtacccgccccttaaacttccaccccacgtaacgttagaagtttatacaagcagtacaataggttgcaccataaccagtggtgtttcgtacaagcacttctgtttccccggagcggggtatagacggtacccactgtcaaaagcccttaaccgttatccgccaatcaactacgtaatggctagtaacaccatgaaggtaagttgacgttcgatcaggtggtaacccccactagtttggtcgatgaggctaggaattccccacgggtaaccgtgtcctagcctgcgtggcggccaacccagcatttgctgggacgccaatttactgacatggtgtgaagacttgcatgtgcttgattgtgactcctccggcccctgaatgcggctaaccttaaccccggagccttgcagcataatccaatgttgtggaggtcgtaatgagcaattctgggatgggaccgactactttgggtgtccgtgtttcctgttttctttaagttgtcttatggtcacagcatatatactatatatactgtgatc

SEQ ID NO: 22688 - DNA, 526 bp, synthetic construct
  source 1..526: mol_type = other DNA
ttaaacttccaccccacgtaacgttagaagtttatacaagcagtacaataggttgcaccataaccagtggtgtttcgtacaagcacttctgtttccccggagcggggtatagacggtacccactgtcaaaagcccttaaccgttatccgccaatcaactacgtaatggctagtaacaccatgaaggtaagttgacgttcgatcaggtggtaacccccactagtttggtcgatgaggctaggaattccccacgggtaaccgtgtcctagcctgcgtggcggccaacccagcatttgctgggacgccaatttactgacatggtgtgaagacttgcatgtgcttgattgtgactcctccggcccctgaatgcggctaaccttaaccccggagccttgcagcataatccaatgttgtggaggtcgtaatgagcaattctgggatgggaccgactactttgggtgtccgtgtttcctgttttctttaagttgtcttatggtcacagcatatatactatatatactgtgatc

SEQ ID NO: 22689 - DNA, 576 bp, synthetic construct
  source 1..576: mol_type = other DNA
ctggtacttcgtacctttgtacgcctgttcttcccattgtacccttcctgaacttccaacccaagtaacgttagaagctcaacatttagtacaacaggaagcaccacatccagtggtgtttagtacaagcacttctgtttccccggagcgaggtataggctgtacccactgccaaaaacctttaaccgttatccgccaaccaactacgtaaaagctagtagtattatgtttttaactaggcgttcgatcaggtggatttcccctccactagtttggtcgatgaggctaggaattccccacgggtgaccgtgtcctagcctgcgtggcggccaacccagcttatgctgggacgcctttttatagacatggtgtgaagactcgcatgtgcttggttgtgattcctccggcccctgaatgcggctaaccttaaccctggagccttgtgtcacaaaccagtgatgataaggtcgtaatgagcaattccgggacgggaccgactactttgggtgtccgtgtttcttatttttcttattattgtcttatggtcacagcatatatataacatatactgtgatc

SEQ ID NO: 22690 - DNA, 526 bp, synthetic construct
  source 1..526: mol_type = other DNA
aacttccaacccaagtaacgttagaagctcaacatttagtacaacaggaagcaccacatccagtggtgtttagtacaagcacttctgtttccccggagcgaggtataggctgtacccactgccaaaaacctttaaccgttatccgccaaccaactacgtaaaagctagtagtattatgtttttaactaggcgttcgatcaggtggatttcccctccactagtttggtcgatgaggctaggaattccccacgggtgaccgtgtcctagcctgcgtggcggccaacccagcttatgctgggacgcctttttatagacatggtgtgaagactcgcatgtgcttggttgtgattcctccggcccctgaatgcggctaaccttaaccctggagccttgtgtcacaaaccagtgatgataaggtcgtaatgagcaattccgggacgggaccgactactttgggtgtccgtgtttcttatttttcttattattgtcttatggtcacagcatatatataacatatactgtgatc

SEQ ID NO: 22691 - DNA, 576 bp, synthetic construct
  source 1..576: mol_type = other DNA
gcgatctcggtcgctttgtatgcctgtttttaccacccaccccaactttactatcttctttacttcacaagtaacatagaagcatgtacatgacgcccaataggacaacgtctcacccagagatgttaagggcaagcacttctgtttccccggatgtgtgaataggcttcacccgaggctgaaactgtagcattcgttatccgcatgactactacgcgactgctagtagcgttctgtgtgacatgtggggtttcgttcagcagagacccagtctgtagatcagggtaatgaggctacacaatccccactggtgacagtggtgtagcctgcgtggtgccctgcccgaggttcgtcctcgggaccctccatgttagacagggtgtgaagacactagtgtgctagtcatgagtcctccggcccctgaatgcggctaatcttaaacctgcagccaccacatgcacgccagcatgcaggtggtcgtaatgagcaattgcgggatggaaccgactactttgggtgtccgtgtttctctttttacatttatgtgtctcttatggttacatcattggtgtaatc

SEQ ID NO: 22692 - DNA, 526 bp, synthetic construct
  source 1..526: mol_type = other DNA
ctatcttctttacttcacaagtaacatagaagcatgtacatgacgcccaataggacaacgtctcacccagagatgttaagggcaagcacttctgtttccccggatgtgtgaataggcttcacccgaggctgaaactgtagcattcgttatccgcatgactactacgcgactgctagtagcgttctgtgtgacatgtggggtttcgttcagcagagacccagtctgtagatcagggtaatgaggctacacaatccccactggtgacagtggtgtagcctgcgtggtgccctgcccgaggttcgtcctcgggaccctccatgttagacagggtgtgaagacactagtgtgctagtcatgagtcctccggcccctgaatgcggctaatcttaaacctgcagccaccacatgcacgccagcatgcaggtggtcgtaatgagcaattgcgggatggaaccgactactttgggtgtccgtgtttctctttttacatttatgtgtctcttatggttacatcattggtgtaatc

SEQ ID NO: 22693 - DNA, 577 bp, synthetic construct
  source 1..577: mol_type = other DNA
ctggtacattgtacctttgtacgcctgttttccccctcttgtacccgcccttcaagctccttgcccaagtaacgttagaagtttgaacattggtacaataggaagcatcacatccagtggtgtactgtacaaacacttctgttgccccggagcgaggtatagatggtccccaccgtcaaaagcctttaaccgttatccgccaatcaactacgtaatggctagtagcaccttggatttaagttggcgttcgatcaggtggtaacccccactagtttggtcgatgaggctaggaattccccacgggtgaccgtgtcctagcctgcgtggcggccaacccagcatccgctgggacgccaatttaatgacatggtgtgaagacctgcatgtgcttgattgtgagtcctccggcccctgaatgcggctaaccctaaccccggagccttgcagcacaatccagtgttgttaaggtcgtaatgagcaattctgggatgggaccgactactttgggtgtccgtgtttcttatttttcttgaatttttcttatggtcacagcatatatacattatatactgtgatc

SEQ ID NO: 22694 - DNA, 527 bp, synthetic construct
  source 1..527: mol_type = other DNA
ttcaagctccttgcccaagtaacgttagaagtttgaacattggtacaataggaagcatcacatccagtggtgtactgtacaaacacttctgttgccccggagcgaggtatagatggtccccaccgtcaaaagcctttaaccgttatccgccaatcaactacgtaatggctagtagcaccttggatttaagttggcgttcgatcaggtggtaacccccactagtttggtcgatgaggctaggaattccccacgggtgaccgtgtcctagcctgcgtggcggccaacccagcatccgctgggacgccaatttaatgacatggtgtgaagacctgcatgtgcttgattgtgagtcctccggcccctgaatgcggctaaccctaaccccggagccttgcagcacaatccagtgttgttaaggtcgtaatgagcaattctgggatgggaccgactactttgggtgtccgtgtttcttatttttcttgaatttttcttatggtcacagcatatatacattatatactgtgatc

SEQ ID NO: 22695 - DNA, 577 bp, synthetic construct
  source 1..577: mol_type = other DNA
ctggtattttgtacctttgcacgcctgtttccccattgtacccctccttaaatttcctccccaagtaacgttagaagtttaaggaaacaaatgtacaataggaagcatcacatccagtggtgttatgtacaagcacttctgtttccccggagcgaggtataagtggtacccaccgccgaaagcctttaaccgttatccgccaatcaactacgtaatggctagtattaccatgtttgtgacttggtgttcgatcaggtggttccccccactagtttggtcgatgaggctaggaactccccacgggtgaccgtgtcctagcctgcgtggcggccaacccagcttttgctgggacgcctttttacagacatggtgtgaagacctgcatgtgcttgattgtgagtcctccggcccctgaatgcggctaaccttaaccccggagccttgcaacataatccaatgttgttgaggtcgtaatgagtaattctgggatgggaccgactactttgggtgtccgtgtttccttttattctttatattgtcttatggtcacagcatatatagcatatatactgtgatc

SEQ ID NO: 22696 - DNA, 527 bp, synthetic construct
  source 1..527: mol_type = other DNA
aatttcctccccaagtaacgttagaagtttaaggaaacaaatgtacaataggaagcatcacatccagtggtgttatgtacaagcacttctgtttccccggagcgaggtataagtggtacccaccgccgaaagcctttaaccgttatccgccaatcaactacgtaatggctagtattaccatgtttgtgacttggtgttcgatcaggtggttccccccactagtttggtcgatgaggctaggaactccccacgggtgaccgtgtcctagcctgcgtggcggccaacccagcttttgctgggacgcctttttacagacatggtgtgaagacctgcatgtgcttgattgtgagtcctccggcccctgaatgcggctaaccttaaccccggagccttgcaacataatccaatgttgttgaggtcgtaatgagtaattctgggatgggaccgactactttgggtgtccgtgtttccttttattctttatattgtcttatggtcacagcatatatagcatatatactgtgatc

SEQ ID NO: 22697 - DNA, 578 bp, synthetic construct
  source 1..578: mol_type = other DNA
ctggtatattgtacctttgcacgcctgttttcccattgtacccttccttaaattcctccccatgtaacgttagaagtttaagaacataaatgtacaataggaagcatcacatccagtggtgtatggtacaagcacttctgtttatccggagcgaggtataagcggtacccactgctgaaagcctttaaccgttaaccgccaatcaactacgtaacggctagtattaccttgtttgcaatctggcgttcgatcaggtggttccccccactagtttggtcgatgaggctaggagttccccacgggcgaccgtgtcctagcctgcgtggcggccaacccagcatttgctgggacgcctttttgtagacatggtgtgaagacctgcatgtgcttgattgtgagtcctccggcccctgaatgcggctaaccttaaccccggagccttgtgacataatccaatgtcattaaggtcgtaatgagcaattctgggacgggaccgactactttgggtgtccgtgtttctctttattctttacattgtcttatggtcacagcatatataatacatatatactgtgatc

SEQ ID NO: 22698 - DNA, 528 bp, synthetic construct
  source 1..528: mol_type = other DNA
aattcctccccatgtaacgttagaagtttaagaacataaatgtacaataggaagcatcacatccagtggtgtatggtacaagcacttctgtttatccggagcgaggtataagcggtacccactgctgaaagcctttaaccgttaaccgccaatcaactacgtaacggctagtattaccttgtttgcaatctggcgttcgatcaggtggttccccccactagtttggtcgatgaggctaggagttccccacgggcgaccgtgtcctagcctgcgtggcggccaacccagcatttgctgggacgcctttttgtagacatggtgtgaagacctgcatgtgcttgattgtgagtcctccggcccctgaatgcggctaaccttaaccccggagccttgtgacataatccaatgtcattaaggtcgtaatgagcaattctgggacgggaccgactactttgggtgtccgtgtttctctttattctttacattgtcttatggtcacagcatatataatacatatatactgtgatc

SEQ ID NO: 22699 - DNA, 580 bp, synthetic construct
  source 1..580: mol_type = other DNA
tctggtatgatgtacctttgtacgcctgtttattcccaaacccccacccgttattcgcccaacccctgtaacgttagaagtttggaacttaattgtacaatagggagcaccatatccaatggtgtaacgtacaagcacttctgtttccccggagcgaggtataggtggtacccactgccgaaagcctttaaccgtcatccgccaatcaactacgtaacagctagtaacatcttgttgttgattggacgttcgatcaggtggttcaccccccactagtttggtcgatgaggctgggaatcccccacgggtgaccgtgtcccagcctgcgtggcggccaacccagcttatgctgggacgccctttcaatgacatggtgtgaagactcgcatgtgcttgattgtgagtccgccggcccctgaatgcggctaaccctaaccctggagccttgcaccacaatccagtggtgtctgggtcgtaatgagtaattctgggatgggaccgactactttgggtgtccgtgtttctcatttttcttttaattgtcttatggtcacagcatatagtattatatactgtgatc

SEQ ID NO: 22700 - DNA, 530 bp, synthetic construct
  source 1..530: mol_type = other DNA
ttattcgcccaacccctgtaacgttagaagtttggaacttaattgtacaatagggagcaccatatccaatggtgtaacgtacaagcacttctgtttccccggagcgaggtataggtggtacccactgccgaaagcctttaaccgtcatccgccaatcaactacgtaacagctagtaacatcttgttgttgattggacgttcgatcaggtggttcaccccccactagtttggtcgatgaggctgggaatcccccacgggtgaccgtgtcccagcctgcgtggcggccaacccagcttatgctgggacgccctttcaatgacatggtgtgaagactcgcatgtgcttgattgtgagtccgccggcccctgaatgcggctaaccctaaccctggagccttgcaccacaatccagtggtgtctgggtcgtaatgagtaattctgggatgggaccgactactttgggtgtccgtgtttctcatttttcttttaattgtcttatggtcacagcatatagtattatatactgtgatc

SEQ ID NO: 22701 - DNA, 581 bp, synthetic construct
  source 1..581: mol_type = other DNA
ctggtactttgtacctttgtatgcctgtttgcttccactcccctttacctaatattcttccccaagtatattttgcggtaacgttagaagaagcaaagttagtgcaataggatgtatcacaaccagtggtataaagcacaagcaattcttgttccccggagctggatatagactgctaacgtggtcaaaagtccttaaccgttatccgccagctaactgcgagaagactagtaacaccatgtttgtttttagacgttcgatcaggtgaataccccattcactagtttggtcgatgaggctgagaataccccacaggtaactgtgtctcagcctgcgtggcggccaacccgactcatgtcgggacgcctactaatagacatggtgtgaagatcctattgcgcttagttgtgagtcctccggcccctgaatgcggctaaccctaaccccggagccttgtggtgtaaaccaacatttgcaaggtcgtaatgagtaattctgggatgggaccgactactttgggtgtccgtgtttcctttatttttattgtgtgtgtcttatggttacaaatacaatttgtaatc

SEQ ID NO: 22702 - DNA, 531 bp, synthetic construct
  source 1..531: mol_type = other DNA
aatattcttccccaagtatattttgcggtaacgttagaagaagcaaagttagtgcaataggatgtatcacaaccagtggtataaagcacaagcaattcttgttccccggagctggatatagactgctaacgtggtcaaaagtccttaaccgttatccgccagctaactgcgagaagactagtaacaccatgtttgtttttagacgttcgatcaggtgaataccccattcactagtttggtcgatgaggctgagaataccccacaggtaactgtgtctcagcctgcgtggcggccaacccgactcatgtcgggacgcctactaatagacatggtgtgaagatcctattgcgcttagttgtgagtcctccggcccctgaatgcggctaaccctaaccccggagccttgtggtgtaaaccaacatttgcaaggtcgtaatgagtaattctgggatgggaccgactactttgggtgtccgtgtttcctttatttttattgtgtgtgtcttatggttacaaatacaatttgtaatc

SEQ ID NO: 22703 - DNA, 583 bp, synthetic construct
  source 1..583: mol_type = other DNA
actctgttattccggtaactttgtacgccagttttccctcccttctccccctcctacccttttacgtaacttagaagctttaaacatgagaccaatagcaggcaactttccaggttgtctaaggtcaagcacttctgtttccccggttgacgttgatatgctccaacagggcaaaaacaactgatatcgttatccgcaaagtgcctacacagagcctagtaggattctgaaagatctttggttggtcgctcagctgcatacccagcagtagacctcgcagatgaggctggacattccccactggtaacagtggtccagcctgcgtggctgcctgcacacctcttacgaggtgtgaagccaaggattcgacagggtgtgaagagccgcgtgtgctcactttgagtcctccggcccctgaatgcggctaaccttaaacctgcagccatagctcataagccaatgagtttatggtcgtaatgagtaattgcgggatgggaccgactactttgggtgtccgtgtttcattttttccttttatcaattgcttatggtgacaatatatatatatatatatattggcatc

SEQ ID NO: 22704 - DNA, 533 bp, synthetic construct
  source 1..533: mol_type = other DNA
ctcctacccttttacgtaacttagaagctttaaacatgagaccaatagcaggcaactttccaggttgtctaaggtcaagcacttctgtttccccggttgacgttgatatgctccaacagggcaaaaacaactgatatcgttatccgcaaagtgcctacacagagcctagtaggattctgaaagatctttggttggtcgctcagctgcatacccagcagtagacctcgcagatgaggctggacattccccactggtaacagtggtccagcctgcgtggctgcctgcacacctcttacgaggtgtgaagccaaggattcgacagggtgtgaagagccgcgtgtgctcactttgagtcctccggcccctgaatgcggctaaccttaaacctgcagccatagctcataagccaatgagtttatggtcgtaatgagtaattgcgggatgggaccgactactttgggtgtccgtgtttcattttttccttttatcaattgcttatggtgacaatatatatatatatatatattggcatc

SEQ ID NO: 22705 - DNA, 589 bp, synthetic construct
  source 1..589: mol_type = other DNA
aggcacacagtgcgtggtacactggaatttcggttcctttgtacgcctgttttcccaccctcatgtttgtttgtctttacgcgtaacttagaagcattgcaaacagctcaataggaatagtccatccaggactgttacgagcaagcacttctgtctccccggacgtgtgaatagacctcaccaaggttgaagctgtagcgttcgttatccgctcatctactgcgcaaagactagtaactaactgaagccttaatggtgtttcgctcagcagtaccccactgtagatcagggcaatgaggctacgcattccccactggtgacagtggcgtagcctgcgtggtgccctgcccaggtttcggcctgggacaccattttgacgacagggtgtgaagaccggcgtgcgctaggtgtgagtcctccggcccctgaatgcggctaatcctaaccctgcagccattgcatgtgatccaacatgtggatggtcgtaatgagtaattgcgggatggaaccgactactttgggtgtccgtgtttcctgttttaccaattactgtctcatggttacaaatttgtgtatcaagtttgtaact

SEQ ID NO: 22706 - DNA, 539 bp, synthetic construct
  source 1..539: mol_type = other DNA
tttcccaccctcatgtttgtttgtctttacgcgtaacttagaagcattgcaaacagctcaataggaatagtccatccaggactgttacgagcaagcacttctgtctccccggacgtgtgaatagacctcaccaaggttgaagctgtagcgttcgttatccgctcatctactgcgcaaagactagtaactaactgaagccttaatggtgtttcgctcagcagtaccccactgtagatcagggcaatgaggctacgcattccccactggtgacagtggcgtagcctgcgtggtgccctgcccaggtttcggcctgggacaccattttgacgacagggtgtgaagaccggcgtgcgctaggtgtgagtcctccggcccctgaatgcggctaatcctaaccctgcagccattgcatgtgatccaacatgtggatggtcgtaatgagtaattgcgggatggaaccgactactttgggtgtccgtgtttcctgttttaccaattactgtctcatggttacaaatttgtgtatcaagtttgtaact

SEQ ID NO: 22707 - DNA, 591 bp, synthetic construct
  source 1..591: mol_type = other DNA
cactggaatctcggttcctttgcatgcctgttttaaaccccccttcccccactctttctatcattcttttcttcctaatgtaacttagacgttataccacagtccaataggacgtggccaatccaggccatgacggacaagcacttctgtctccccgggcgtgtgaataggcctcaacaaggctgaagctgtagcgctcgttatccgcatttgtactacgcgatggctagtatcatccttctcttggtcttggcgtttcgctcagcgtggtaaccccccacgtagatcagggcaatgaggctgcatatgccccaccggcgacggtgatgcagcctgcgtggtgccccgcctgggttaacccccaggacgccacaatcaagacagggtgagaagacctgagtgtgctacagatgagtcctccggcccctgaatgcggctaatcctaaccctgcagctatcgtatgcaaaccagcatattggtagtcgtaacgagcaattgcgggacggaaccgactactttgggtgtccgtgtttctctttttatttgaaatgttgcttatggttacaagttttggtattaaacttgtgacc

SEQ ID NO: 22708 - DNA, 541 bp, synthetic construct
  source 1..541: mol_type = other DNA
actctttctatcattcttttcttcctaatgtaacttagacgttataccacagtccaataggacgtggccaatccaggccatgacggacaagcacttctgtctccccgggcgtgtgaataggcctcaacaaggctgaagctgtagcgctcgttatccgcatttgtactacgcgatggctagtatcatccttctcttggtcttggcgtttcgctcagcgtggtaaccccccacgtagatcagggcaatgaggctgcatatgccccaccggcgacggtgatgcagcctgcgtggtgccccgcctgggttaacccccaggacgccacaatcaagacagggtgagaagacctgagtgtgctacagatgagtcctccggcccctgaatgcggctaatcctaaccctgcagctatcgtatgcaaaccagcatattggtagtcgtaacgagcaattgcgggacggaaccgactactttgggtgtccgtgtttctctttttatttgaaatgttgcttatggttacaagttttggtattaaacttgtgacc

SEQ ID NO: 22709 - DNA, 592 bp, synthetic construct
  source 1..592: mol_type = other DNA
cagttgtgtctcgatcaagcacttctgtctccccggaccgagtatcaatagactgctcacgcggttgaaggagaaagcgttcgttacccggctgactacttcgagaaacctagtagcactatgaaagttgcgaagtgtttcgttcagcacttcccccgtgtagatcaggtcgatgagtcactgtattccctacgggtgaccgtagcagtggctgcgttggcggcctgcccatggggcaacccatgggacgcttcaatacagacatggtgcgaagagtctattgagctagtcagtagtcctccggcccctgaatgcggctaatcctaactgcggagcatgtgccttcgatccagagggtagcatgtcgtaatgggcaactctgcagcggaaccgactactttgggtgtccgtgtttccttttattcttatactggctgcttatggtgacaattgagagattgttgccatatagctattggattggccatccggtgagtaatagagctattatctactcctttgtgggttttgtatcattgaactataaggtcttgaagactctcaactttattttgacactcaacaccgcaaa

SEQ ID NO: 22710 - DNA, 542 bp, synthetic construct
  source 1..542: mol_type = other DNA
gactgctcacgcggttgaaggagaaagcgttcgttacccggctgactacttcgagaaacctagtagcactatgaaagttgcgaagtgtttcgttcagcacttcccccgtgtagatcaggtcgatgagtcactgtattccctacgggtgaccgtagcagtggctgcgttggcggcctgcccatggggcaacccatgggacgcttcaatacagacatggtgcgaagagtctattgagctagtcagtagtcctccggcccctgaatgcggctaatcctaactgcggagcatgtgccttcgatccagagggtagcatgtcgtaatgggcaactctgcagcggaaccgactactttgggtgtccgtgtttccttttattcttatactggctgcttatggtgacaattgagagattgttgccatatagctattggattggccatccggtgagtaatagagctattatctactcctttgtgggttttgtatcattgaactataaggtcttgaagactctcaactttattttgacactcaacaccgcaaa

SEQ ID NO: 22711 - DNA, 593 bp, synthetic construct
  source 1..593: mol_type = other DNA
ccaactgggtcttgaccaagcacttctgttaccccggaccgagtatcaataggctgcccacgcggctgaaggagaaaacgttcgttacccggccaattacttcgagaaacctagtatcaccatggaagttgcgcggcgtttcgctccacacaaccccagtgtagatcaggctgatgagtcaccgcactcctcacgggcgaccgtggcggtggctgcgttggcggcctgcccatggggcaacccatgggacgcctcaatactgacatggtgtgaagagtctattgagctaattggtagtcctccggcccctgaatgcggctaatcctaactgcggagcagacactcacaagccagtgggcggtctgtcgtaacgggcaactctgcagcggaaccgactactttgggtgtccgtgtttccttttattcctacattggctgcttatggtgacaattgagagattgttaccatatagctattggattggccatccggtgacaaacagagcgattgtctattcatttgtcggttttgtaccattaaactccaaagtcttgaaaaccctcaacctaatcatcctacttaactcagtaaa

SEQ ID NO: 22712 - DNA, 543 bp, synthetic construct
  source 1..543: mol_type = other DNA
aggctgcccacgcggctgaaggagaaaacgttcgttacccggccaattacttcgagaaacctagtatcaccatggaagttgcgcggcgtttcgctccacacaaccccagtgtagatcaggctgatgagtcaccgcactcctcacgggcgaccgtggcggtggctgcgttggcggcctgcccatggggcaacccatgggacgcctcaatactgacatggtgtgaagagtctattgagctaattggtagtcctccggcccctgaatgcggctaatcctaactgcggagcagacactcacaagccagtgggcggtctgtcgtaacgggcaactctgcagcggaaccgactactttgggtgtccgtgtttccttttattcctacattggctgcttatggtgacaattgagagattgttaccatatagctattggattggccatccggtgacaaacagagcgattgtctattcatttgtcggttttgtaccattaaactccaaagtcttgaaaaccctcaacctaatcatcctacttaactcagtaaa

SEQ ID NO: 22713 - DNA, 593 bp, synthetic construct
  source 1..593: mol_type = other DNA
ggtgtagtactctggtattatgtacctttgtacgcctgtttactcccaaaccccccctcccgttacatttccaacccctgtaacgttagaagtttggaatttaacagtacaataggaggcaccatacccaatggtgtaatgtacaagcacttctgtttccccggagcgaggtataggtggtacccaccgctgaaagcctttaaccgttatccgccaatcaactacgtaacagctagtagcattttgtcgttgactggacgttcgatcaggtggtttacccccccactagtttggtcgatgaggctggaaattccccacgggtgaccgtgttccagcctgcgtggcggccaacccagctcatgctgggacgccctttcaatgacatggtgtgaagactcgcatgtgcttggttgtgaatcctccggcccctgaatgcggctaaccctaaccccggagccttgcatcgcaatccagtgatgttggggtcgtaatgagtaattctgggatgggaccgactactttgggtgtccgtgtttctcatttttctttgaattatcttatggtcacagcatatagtaatatatactgtgatc

SEQ ID NO: 22714 - DNA, 543 bp, synthetic construct
  source 1..543: mol_type = other DNA
ccccccctcccgttacatttccaacccctgtaacgttagaagtttggaatttaacagtacaataggaggcaccatacccaatggtgtaatgtacaagcacttctgtttccccggagcgaggtataggtggtacccaccgctgaaagcctttaaccgttatccgccaatcaactacgtaacagctagtagcattttgtcgttgactggacgttcgatcaggtggtttacccccccactagtttggtcgatgaggctggaaattccccacgggtgaccgtgttccagcctgcgtggcggccaacccagctcatgctgggacgccctttcaatgacatggtgtgaagactcgcatgtgcttggttgtgaatcctccggcccctgaatgcggctaaccctaaccccggagccttgcatcgcaatccagtgatgttggggtcgtaatgagtaattctgggatgggaccgactactttgggtgtccgtgtttctcatttttctttgaattatcttatggtcacagcatatagtaatatatactgtgatc

SEQ ID NO: 22715 - DNA, 597 bp, synthetic construct
  source 1..597: mol_type = other DNA
agcaattcaaacagttcaatagagggggtacaaaccagtaccaccacgaacaagcacttctgtttccccggtgaagctgtatagactgtgcccacggttgaaaatggctaatccgttatccgcttaagtacttcgagaagcctagtatcaccttggaatcttcgacgcgttgcgctcagcactctaccccgagtgtagcttaggctgatgagtctgggcataccccaccggcgacggtggcccaggctgcgttggcggcctacccatggctaacgccatgggacgctagttgtgaacaaggtgtgaagagcctattgagctacttgagagtcctccggcccctgaatgcggctaatcccaaccacggagcaagtgctcacaaaccagtgagtggcttgtcgtaacgcgcaagtctgtggcggaaccgactactttgggtgtccgtgtttccttttatttttatcatggctgcttatggtgacaatctaagattgttatcatatagcgtttggattggccatccggtgatttcaaaagtgatatatttgacctatcgccttactgtgtttacctactcattacatccactcaaccata

SEQ ID NO: 22716 - DNA, 547 bp, synthetic construct
  source 1..547: mol_type = other DNA
caagcacttctgtttccccggtgaagctgtatagactgtgcccacggttgaaaatggctaatccgttatccgcttaagtacttcgagaagcctagtatcaccttggaatcttcgacgcgttgcgctcagcactctaccccgagtgtagcttaggctgatgagtctgggcataccccaccggcgacggtggcccaggctgcgttggcggcctacccatggctaacgccatgggacgctagttgtgaacaaggtgtgaagagcctattgagctacttgagagtcctccggcccctgaatgcggctaatcccaaccacggagcaagtgctcacaaaccagtgagtggcttgtcgtaacgcgcaagtctgtggcggaaccgactactttgggtgtccgtgtttccttttatttttatcatggctgcttatggtgacaatctaagattgttatcatatagcgtttggattggccatccggtgatttcaaaagtgatatatttgacctatcgccttactgtgtttacctactcattacatccactcaaccata

SEQ ID NO: 22717 - DNA, 598 bp, synthetic construct
  source 1..598: mol_type = other DNA
gaagtaaatcataaagttcaatagaagggggtgcaagccagcaccaccacgaacaagcacttctgtttccccggtgaagccgtatagactgcccccgcggttgaaaatggcagatccgttatccgctcacgtacttcgagaagcctagtatcaccttggaatcttcgacgcgttgcgctcagcactctaccccgagtgtagcttaggtcgatgagtctgggcataccccaccggtgacggtggcccaggctgcgttggcggcctacccatggttaacaccatgggacgctagttgtgaacaaggtgtgaagagcctattgagctacctgagagtcctccggcccctgaatgcggctaatcccaaccacggagcaagtgctcacaaaccagtgggtagcttgtcgtaacgcgcaagtctgtggcggaaccgactactttgggtgtccgtgtttccttttatttttatcatggctgcttatggtgacaatctaagattgttatcatatagctattggattggccatccggtgatttttgaaagtgatatttgccttgctatttcattgcatttgcttacttataatactgcaaactcaca

SEQ ID NO: 22718 - DNA, 548 bp, synthetic construct
  source 1..548: mol_type = other DNA
gaacaagcacttctgtttccccggtgaagccgtatagactgcccccgcggttgaaaatggcagatccgttatccgctcacgtacttcgagaagcctagtatcaccttggaatcttcgacgcgttgcgctcagcactctaccccgagtgtagcttaggtcgatgagtctgggcataccccaccggtgacggtggcccaggctgcgttggcggcctacccatggttaacaccatgggacgctagttgtgaacaaggtgtgaagagcctattgagctacctgagagtcctccggcccctgaatgcggctaatcccaaccacggagcaagtgctcacaaaccagtgggtagcttgtcgtaacgcgcaagtctgtggcggaaccgactactttgggtgtccgtgtttccttttatttttatcatggctgcttatggtgacaatctaagattgttatcatatagctattggattggccatccggtgatttttgaaagtgatatttgccttgctatttcattgcatttgcttacttataatactgcaaactcaca

SEQ ID NO: 22719 - DNA, 598 bp, synthetic construct
  source 1..598: mol_type = other DNA
cgacccactgggtgtagtactctggtattatgtacctttgtacgcctgttcttcccattgtaccctccctaaatttccaacccaagtaacgttagaagttccacataacagtacaataggaagcaccacatccagtggtgttttgtacaagcacttctgtctccccggagcgaggtataggctgtacccactgccaaaagcctttaaccgttatccgccaaccaactacgtaaaagctagtaacatcttgtttgtaacttggcgttcgatcaggtggattccccctccattagtttggtcgatgaggctaggaattccccacgggcgaccgtgtcctagcctgcgtggcggccaacccagcatttgctgggacgcccttttatagacatggtgtgaagactcgcatgtgcttggttgtgactcctccggcccctgaatgcggctaaccttaaccccggagccttgtgttgcaagccagcaacattaaggtcgtaatgagtaattctgggacgggaccgactactttgggtgtccgtgtttccaatttttcttattattgtcttatggtcacagcatatttgacaaatatactgtgatc

SEQ ID NO: 22720 - DNA, 548 bp, synthetic construct
  source 1..548: mol_type = other DNA
cttcccattgtaccctccctaaatttccaacccaagtaacgttagaagttccacataacagtacaataggaagcaccacatccagtggtgttttgtacaagcacttctgtctccccggagcgaggtataggctgtacccactgccaaaagcctttaaccgttatccgccaaccaactacgtaaaagctagtaacatcttgtttgtaacttggcgttcgatcaggtggattccccctccattagtttggtcgatgaggctaggaattccccacgggcgaccgtgtcctagcctgcgtggcggccaacccagcatttgctgggacgcccttttatagacatggtgtgaagactcgcatgtgcttggttgtgactcctccggcccctgaatgcggctaaccttaaccccggagccttgtgttgcaagccagcaacattaaggtcgtaatgagtaattctgggacgggaccgactactttgggtgtccgtgtttccaatttttcttattattgtcttatggtcacagcatatttgacaaatatactgtgatc

SEQ ID NO: 22721 - DNA, 599 bp, synthetic construct
  source 1..599: mol_type = other DNA
agtatgccaactgggtcttgaccaagcacttctgttaccccggactgagtatcaataggctgctcacgcggctgaaggagaaaacgttcgttacccggccagttacttcgagaaacctagtaccaccatgaaggttgcgcagcgtttcgctccgcacaaccccagtgtagatcaggccgatgagtcaccgcatccctcacgggcgaccgtggcggtggctgcgttggcggcctgcccatggggcaacccatgggacgcttcaatactgacatggtgcgaagagtctattgagctaattggtagtcctccggcccctgaatgcggctaatcctaactgcggagcagatacccgcgtgccagcgggcagtctgtcgtaatgggcaactctgcagcggaaccgactactttgggtgtccgtgtttccttttattcttacactggctgcttatggtgacaattgaaagattgttaccatatagctattggattggccatccggtgactaacagagcgattatctatcaatttgttggttttgtgccattggatttcccaaccctaagaacccttaattttatattggtacttaacacgacaag

SEQ ID NO: 22722 - DNA, 549 bp, synthetic construct
  source 1..549: mol_type = other DNA
atcaataggctgctcacgcggctgaaggagaaaacgttcgttacccggccagttacttcgagaaacctagtaccaccatgaaggttgcgcagcgtttcgctccgcacaaccccagtgtagatcaggccgatgagtcaccgcatccctcacgggcgaccgtggcggtggctgcgttggcggcctgcccatggggcaacccatgggacgcttcaatactgacatggtgcgaagagtctattgagctaattggtagtcctccggcccctgaatgcggctaatcctaactgcggagcagatacccgcgtgccagcgggcagtctgtcgtaatgggcaactctgcagcggaaccgactactttgggtgtccgtgtttccttttattcttacactggctgcttatggtgacaattgaaagattgttaccatatagctattggattggccatccggtgactaacagagcgattatctatcaatttgttggttttgtgccattggatttcccaaccctaagaacccttaattttatattggtacttaacacgacaag

SEQ ID NO: 22723 - DNA, 601 bp, synthetic construct
  source 1..601: mol_type = other DNA
cagtacctctatgaacaagcacttctgtttccccggtgacattgcatagactgctcacgcggttgaaagcgatcgatccgttatccgcttgtgtacttcgaaaagcctagtatcgccttggaatcttcgacgcgttgcgctcagcacccgatcccggggtgtagcttaggctgatgagtctggacgtccctcaccggcgacggtggtccaggctgcgttggcggcctacctatggctaacgccataggacgctagatgtgaacaaggtgtgaagagcctattgagctacacgagagtcctccggcccctgaatgcggctaatcctaaccacggagcaagcggtcacgaaccagtggctggcttgtcgtaacgcgcaagtctgtggcggaaccgactactttgggtgtccgtgtttcctgttatttttatcatggctgcttatggtgacaatctgtgattgttatcataaagcgatttggattggccatccggtgagtgttgtatcgaacatttgactgttcatcagaactactgtgttagattcacttcttattcaactaattaatcaaaaacagtacgaagacaaaacaacaatactaca

SEQ ID NO: 22724 - DNA, 551 bp, synthetic construct
  source 1..551: mol_type = other DNA
ctgctcacgcggttgaaagcgatcgatccgttatccgcttgtgtacttcgaaaagcctagtatcgccttggaatcttcgacgcgttgcgctcagcacccgatcccggggtgtagcttaggctgatgagtctggacgtccctcaccggcgacggtggtccaggctgcgttggcggcctacctatggctaacgccataggacgctagatgtgaacaaggtgtgaagagcctattgagctacacgagagtcctccggcccctgaatgcggctaatcctaaccacggagcaagcggtcacgaaccagtggctggcttgtcgtaacgcgcaagtctgtggcggaaccgactactttgggtgtccgtgtttcctgttatttttatcatggctgcttatggtgacaatctgtgattgttatcataaagcgatttggattggccatccggtgagtgttgtatcgaacatttgactgttcatcagaactactgtgttagattcacttcttattcaactaattaatcaaaaacagtacgaagacaaaacaacaatactaca

SEQ ID NO: 22725 - DNA, 501 bp, synthetic construct
  source 1..501: mol_type = other DNA
aaaagcctagtatcgccttggaatcttcgacgcgttgcgctcagcacccgatcccggggtgtagcttaggctgatgagtctggacgtccctcaccggcgacggtggtccaggctgcgttggcggcctacctatggctaacgccataggacgctagatgtgaacaaggtgtgaagagcctattgagctacacgagagtcctccggcccctgaatgcggctaatcctaaccacggagcaagcggtcacgaaccagtggctggcttgtcgtaacgcgcaagtctgtggcggaaccgactactttgggtgtccgtgtttcctgttatttttatcatggctgcttatggtgacaatctgtgattgttatcataaagcgatttggattggccatccggtgagtgttgtatcgaacatttgactgttcatcagaactactgtgttagattcacttcttattcaactaattaatcaaaaacagtacgaagacaaaacaacaatactaca

SEQ ID NO: 22726 - DNA, 601 bp, synthetic construct
  source 1..601: mol_type = other DNA
gtgtcgatccagacgcatcttgatcaagcacttctgttcccccggaccgagtatcaataagctactaacgtggctgaaggagaaaatgtccgttacccggccaactacttcgagaagcccagtaccaccatgaacgttgcagagtgtttcgctcagcacaaccccagtgtagatcaggccgatgagtcaccgcattcctcacgggcgaccgtggcggtggctgcgctggcggcctgcctatggggaaacccataggacgctctaatactgacatggtgcgaagagcctattgagctagttggtagtcctccggcccctgaatgcggctaatcctaactgcggagcatgtgctcacaatccagtgagtggcatgtcgtaacgggtaactctgcagcggaaccgactactttgggtgtccgtgtttccttttatatttatactggctgcttatggtgacaatcaaggaattgttaccatatagctattggattggccatccggtgactaatagagctataatttacctatttgttggattcgtccccctgaacacaaaaacagttcagactctacagtacatcttatttttgaacttgaagaa

SEQ ID NO: 22727 - DNA, 551 bp, synthetic construct
  source 1..551: mol_type = other DNA
gtatcaataagctactaacgtggctgaaggagaaaatgtccgttacccggccaactacttcgagaagcccagtaccaccatgaacgttgcagagtgtttcgctcagcacaaccccagtgtagatcaggccgatgagtcaccgcattcctcacgggcgaccgtggcggtggctgcgctggcggcctgcctatggggaaacccataggacgctctaatactgacatggtgcgaagagcctattgagctagttggtagtcctccggcccctgaatgcggctaatcctaactgcggagcatgtgctcacaatccagtgagtggcatgtcgtaacgggtaactctgcagcggaaccgactactttgggtgtccgtgtttccttttatatttatactggctgcttatggtgacaatcaaggaattgttaccatatagctattggattggccatccggtgactaatagagctataatttacctatttgttggattcgtccccctgaacacaaaaacagttcagactctacagtacatcttatttttgaacttgaagaa

SEQ ID NO: 22728 - DNA, 501 bp, synthetic construct
  source 1..501: mol_type = other DNA
ccaactacttcgagaagcccagtaccaccatgaacgttgcagagtgtttcgctcagcacaaccccagtgtagatcaggccgatgagtcaccgcattcctcacgggcgaccgtggcggtggctgcgctggcggcctgcctatggggaaacccataggacgctctaatactgacatggtgcgaagagcctattgagctagttggtagtcctccggcccctgaatgcggctaatcctaactgcggagcatgtgctcacaatccagtgagtggcatgtcgtaacgggtaactctgcagcggaaccgactactttgggtgtccgtgtttccttttatatttatactggctgcttatggtgacaatcaaggaattgttaccatatagctattggattggccatccggtgactaatagagctataatttacctatttgttggattcgtccccctgaacacaaaaacagttcagactctacagtacatcttatttttgaacttgaagaa

SEQ ID NO: 22729 - DNA, 604 bp, synthetic construct
  source 1..604: mol_type = other DNA
cacaagttcaatagtaggaccatcatccaggtggttcatcgaacaagcacttctgttaccccggtcctagtacctgtgaagctgtacccacggcggaaggggaaaacgatcgttacccggctatctacttcgagaagcctagtaacagcattgaaactcttgagcgttgcgttcagcacagtaacccctgtgtagctttggctgatgagtctgggcattccccactggcgacagtggcccaggctgcgttggcggccaaccgatccgggcaaccgggtcggacgcttatttgtggacatggtgtgaagagcctattgagctagatagtagtcctccggcccctgaatgcggctaatcctaactccggagcaaatgcacgcaacccagcgtgtagtttgtcgtaacgcgtaagtctggagcggaaccgactactttgggtgtccgtgtttcctgttttaccttatttggctgcttatggtgacaatatagtattgttaccatatagctattggattggccatccggtgaacagatttcgacaaactctattttactgttgttcacagcctaaagttacaaatcttactctgactcagtagtaatc

SEQ ID NO: 22730 - DNA, 554 bp, synthetic construct
  source 1..554: mol_type = other DNA
ttctgttaccccggtcctagtacctgtgaagctgtacccacggcggaaggggaaaacgatcgttacccggctatctacttcgagaagcctagtaacagcattgaaactcttgagcgttgcgttcagcacagtaacccctgtgtagctttggctgatgagtctgggcattccccactggcgacagtggcccaggctgcgttggcggccaaccgatccgggcaaccgggtcggacgcttatttgtggacatggtgtgaagagcctattgagctagatagtagtcctccggcccctgaatgcggctaatcctaactccggagcaaatgcacgcaacccagcgtgtagtttgtcgtaacgcgtaagtctggagcggaaccgactactttgggtgtccgtgtttcctgttttaccttatttggctgcttatggtgacaatatagtattgttaccatatagctattggattggccatccggtgaacagatttcgacaaactctattttactgttgttcacagcctaaagttacaaatcttactctgactcagtagtaatc

SEQ ID NO: 22731 - DNA, 504 bp, synthetic construct
  source 1..504: mol_type = other DNA
ggaaaacgatcgttacccggctatctacttcgagaagcctagtaacagcattgaaactcttgagcgttgcgttcagcacagtaacccctgtgtagctttggctgatgagtctgggcattccccactggcgacagtggcccaggctgcgttggcggccaaccgatccgggcaaccgggtcggacgcttatttgtggacatggtgtgaagagcctattgagctagatagtagtcctccggcccctgaatgcggctaatcctaactccggagcaaatgcacgcaacccagcgtgtagtttgtcgtaacgcgtaagtctggagcggaaccgactactttgggtgtccgtgtttcctgttttaccttatttggctgcttatggtgacaatatagtattgttaccatatagctattggattggccatccggtgaacagatttcgacaaactctattttactgttgttcacagcctaaagttacaaatcttactctgactcagtagtaatc

SEQ ID NO: 22732 - DNA, 605 bp, synthetic construct
  source 1..605: mol_type = other DNA
taaaagcctcaattgtaacaaacatctaagaacactacattaaccccatgcctggtctccactagttgaaggcgacttgcaataagatgagtggaaacaagacgcttaaagcatggtgtaaatcaacttttctaacctgtacattgtatggggtggcagatggcgtgccataattctatcagtgagataccacgcttgtggaccttatgctcacacagccatcctctagtaagtttgtgagacgtctggagacgtgtgggaacttattggaaacaacattttgctgtaaagcatcctactgccagcggaacaacacctggtaacaggtgcctctggggccaaaagccaaggtttaacagaccctctaggattggtttaaaacctgagatgttgtggaaaatattcagtacctaccaatctggtagtagtgcaaacactagttgtaaggcccacgaaggatgcccagaaggtacccgtaggtaacaagtgacactacggatctgatctggggccaggtacctctatctaggtgacctggttaaaaaacgtctagtgggccaaacccgggggggaccccggtttccttttattttatcaatgccact

SEQ ID NO: 22733 - DNA, 555 bp, synthetic construct
  source 1..555: mol_type = other DNA
cctggtctccactagttgaaggcgacttgcaataagatgagtggaaacaagacgcttaaagcatggtgtaaatcaacttttctaacctgtacattgtatggggtggcagatggcgtgccataattctatcagtgagataccacgcttgtggaccttatgctcacacagccatcctctagtaagtttgtgagacgtctggagacgtgtgggaacttattggaaacaacattttgctgtaaagcatcctactgccagcggaacaacacctggtaacaggtgcctctggggccaaaagccaaggtttaacagaccctctaggattggtttaaaacctgagatgttgtggaaaatattcagtacctaccaatctggtagtagtgcaaacactagttgtaaggcccacgaaggatgcccagaaggtacccgtaggtaacaagtgacactacggatctgatctggggccaggtacctctatctaggtgacctggttaaaaaacgtctagtgggccaaacccgggggggaccccggtttccttttattttatcaatgccact

SEQ ID NO: 22734 - DNA, 505 bp, synthetic construct
  source 1..505: mol_type = other DNA
gacgcttaaagcatggtgtaaatcaacttttctaacctgtacattgtatggggtggcagatggcgtgccataattctatcagtgagataccacgcttgtggaccttatgctcacacagccatcctctagtaagtttgtgagacgtctggagacgtgtgggaacttattggaaacaacattttgctgtaaagcatcctactgccagcggaacaacacctggtaacaggtgcctctggggccaaaagccaaggtttaacagaccctctaggattggtttaaaacctgagatgttgtggaaaatattcagtacctaccaatctggtagtagtgcaaacactagttgtaaggcccacgaaggatgcccagaaggtacccgtaggtaacaagtgacactacggatctgatctggggccaggtacctctatctaggtgacctggttaaaaaacgtctagtgggccaaacccgggggggaccccggtttccttttattttatcaatgccact

SEQ ID NO: 22735 - DNA, 605 bp, synthetic construct
  source 1..605: mol_type = other DNA
atagcaaatccaccaacccaggtgggttttcgtcaagcacttctgtttccccggacctagtaccaataggctgtacccacggctgaaagggaaaacgttcgttacccggctacctacttcgagaagcctagtaccatcattgaatgtctcaagtgttacgctcagcacaaccccagtgcagttcaggctgatgagtcaccgaatcccccacgggcgaccgtgtcggtggctgcgttggcggcctgcctgcgagttccactcgcaggacgcttgattcatgacatggtgcgaagagcctattgagctaggtagtagtcctccggcccctgaatgcggctaatcccaaccacggagcatccactgacaaaccagtcagcagggtgtcgtaatgggcaactctgtggcggaaccgactactttgggtgtccgtgtttcctgttttatttactctggctgcttatggtgacaatttacggattgttaccatatagctattggattggccatccggattacaagcaagtaatattactgtttgtgggatttttacccttgaatcacattaactacttcattctactaatagtcttgaagttaagtacatc

SEQ ID NO: 22736 - DNA, 555 bp, synthetic construct
  source 1..555: mol_type = other DNA
ccggacctagtaccaataggctgtacccacggctgaaagggaaaacgttcgttacccggctacctacttcgagaagcctagtaccatcattgaatgtctcaagtgttacgctcagcacaaccccagtgcagttcaggctgatgagtcaccgaatcccccacgggcgaccgtgtcggtggctgcgttggcggcctgcctgcgagttccactcgcaggacgcttgattcatgacatggtgcgaagagcctattgagctaggtagtagtcctccggcccctgaatgcggctaatcccaaccacggagcatccactgacaaaccagtcagcagggtgtcgtaatgggcaactctgtggcggaaccgactactttgggtgtccgtgtttcctgttttatttactctggctgcttatggtgacaatttacggattgttaccatatagctattggattggccatccggattacaagcaagtaatattactgtttgtgggatttttacccttgaatcacattaactacttcattctactaatagtcttgaagttaagtacatc

SEQ ID NO: 22737 - DNA, 505 bp, synthetic construct
  source 1..505: mol_type = other DNA
gttacccggctacctacttcgagaagcctagtaccatcattgaatgtctcaagtgttacgctcagcacaaccccagtgcagttcaggctgatgagtcaccgaatcccccacgggcgaccgtgtcggtggctgcgttggcggcctgcctgcgagttccactcgcaggacgcttgattcatgacatggtgcgaagagcctattgagctaggtagtagtcctccggcccctgaatgcggctaatcccaaccacggagcatccactgacaaaccagtcagcagggtgtcgtaatgggcaactctgtggcggaaccgactactttgggtgtccgtgtttcctgttttatttactctggctgcttatggtgacaatttacggattgttaccatatagctattggattggccatccggattacaagcaagtaatattactgtttgtgggatttttacccttgaatcacattaactacttcattctactaatagtcttgaagttaagtacatc

SEQ ID NO: 22738 - DNA, 614 bp, synthetic construct
  source 1..614: mol_type = other DNA
atctcccttcccccgtaacgttagaagaaaacacaaccgacaactagcagattcaccaatccaggtgagtcttcgtcaagcacttctgtttccccggacttagtaccaataggctgtacccacggctgaaggggaaaacgttcgttatccggctacctacttcgagaagcctagtaccaccattgaatgtctcaagtgttacgttcagcacaaccccagtgtagttcaggtcgatgagtcaccgaattccccacgggcgaccgtgtcggtggctgcgttggcggcctgcctgcgggtttcacccgcaggacgcttgattcatgacatggtgcgaagagcctattgagctaggtagtagtcctccggcccctgaatgcggctaatcctaaccacggagccatgcgttacaatccagtaacgttgtggtcgtaacgagtaattctgtggcggaaccgactactttgggtgtccgtgtttcctgttttactcattttggctgcttatggtgacaatctagggttgtcatcatatagcgattggattggccatccggatttgtctttgtgtgatttatctcttgctcacaagcaattttcataggtcatagcatcatc

SEQ ID NO: 22739 - DNA, 564 bp, synthetic construct
  source 1..564: mol_type = other DNA
attcaccaatccaggtgagtcttcgtcaagcacttctgtttccccggacttagtaccaataggctgtacccacggctgaaggggaaaacgttcgttatccggctacctacttcgagaagcctagtaccaccattgaatgtctcaagtgttacgttcagcacaaccccagtgtagttcaggtcgatgagtcaccgaattccccacgggcgaccgtgtcggtggctgcgttggcggcctgcctgcgggtttcacccgcaggacgcttgattcatgacatggtgcgaagagcctattgagctaggtagtagtcctccggcccctgaatgcggctaatcctaaccacggagccatgcgttacaatccagtaacgttgtggtcgtaacgagtaattctgtggcggaaccgactactttgggtgtccgtgtttcctgttttactcattttggctgcttatggtgacaatctagggttgtcatcatatagcgattggattggccatccggatttgtctttgtgtgatttatctcttgctcacaagcaattttcataggtcatagcatcatc

SEQ ID NO: 22740 - DNA, 514 bp, synthetic construct
  source 1..514: mol_type = other DNA
tagtaccaataggctgtacccacggctgaaggggaaaacgttcgttatccggctacctacttcgagaagcctagtaccaccattgaatgtctcaagtgttacgttcagcacaaccccagtgtagttcaggtcgatgagtcaccgaattccccacgggcgaccgtgtcggtggctgcgttggcggcctgcctgcgggtttcacccgcaggacgcttgattcatgacatggtgcgaagagcctattgagctaggtagtagtcctccggcccctgaatgcggctaatcctaaccacggagccatgcgttacaatccagtaacgttgtggtcgtaacgagtaattctgtggcggaaccgactactttgggtgtccgtgtttcctgttttactcattttggctgcttatggtgacaatctagggttgtcatcatatagcgattggattggccatccggatttgtctttgtgtgatttatctcttgctcacaagcaattttcataggtcatagcatcatc

SEQ ID NO: 22741 - DNA, 616 bp, synthetic construct
  source 1..616: mol_type = other DNA
actctggtattgcggtacctttgtatgcctattttacctcccttccccctgaaacttagaagaaagaaacaaacacgctcactaggtacactgcatccagcagtgtaatgagcaagcacttctgtttccccggaagggatatatggtacgctgtgcaaacggcggaaattaatcctaccgttaaccgcccatctactccgagaagcctagtacctaattgaacttatcaatggagttgcgctcagcaggtgaccctgacctgccagctccggctgatggacctgggcatcccccacaggcgactgtggcccaggtcgcgtggcggccggcccactcttttgagtgggacgccttgataatgacaaggtgggaagagcctattgggctagctggtttcctccggcctcctgaatgcggctaaccctaaccccggagcatatggtggcaacccagccactggtatgtcgtaacgcgtaagtctgggatgggaccgactactttggagagtccgtgtttccattattttctttattgaatcttatggtgacaaattgggagttactcgggtgacgattgattattacttctgaaaacgtagagatatagaatcaacaca

SEQ ID NO: 22742 - DNA, 566 bp, synthetic construct
  source 1..566: mol_type = other DNA
gaaacttagaagaaagaaacaaacacgctcactaggtacactgcatccagcagtgtaatgagcaagcacttctgtttccccggaagggatatatggtacgctgtgcaaacggcggaaattaatcctaccgttaaccgcccatctactccgagaagcctagtacctaattgaacttatcaatggagttgcgctcagcaggtgaccctgacctgccagctccggctgatggacctgggcatcccccacaggcgactgtggcccaggtcgcgtggcggccggcccactcttttgagtgggacgccttgataatgacaaggtgggaagagcctattgggctagctggtttcctccggcctcctgaatgcggctaaccctaaccccggagcatatggtggcaacccagccactggtatgtcgtaacgcgtaagtctgggatgggaccgactactttggagagtccgtgtttccattattttctttattgaatcttatggtgacaaattgggagttactcgggtgacgattgattattacttctgaaaacgtagagatatagaatcaacaca

SEQ ID NO: 22743 - DNA, 516 bp, synthetic construct
  source 1..516: mol_type = other DNA
cagtgtaatgagcaagcacttctgtttccccggaagggatatatggtacgctgtgcaaacggcggaaattaatcctaccgttaaccgcccatctactccgagaagcctagtacctaattgaacttatcaatggagttgcgctcagcaggtgaccctgacctgccagctccggctgatggacctgggcatcccccacaggcgactgtggcccaggtcgcgtggcggccggcccactcttttgagtgggacgccttgataatgacaaggtgggaagagcctattgggctagctggtttcctccggcctcctgaatgcggctaaccctaaccccggagcatatggtggcaacccagccactggtatgtcgtaacgcgtaagtctgggatgggaccgactactttggagagtccgtgtttccattattttctttattgaatcttatggtgacaaattgggagttactcgggtgacgattgattattacttctgaaaacgtagagatatagaatcaacaca

SEQ ID NO: 22744 - DNA, 617 bp, synthetic construct
  source 1..617: mol_type = other DNA
tcagtggttggatgctcagtcctgagggactgtgcatccagtggttaagagccacattctttatttatcaactattgatctttgtaactaagtttaagccagagttctattatggttccacatccagtgggattcagaacaagtacttctgttaccccggtcattattagctgttaagacgtacccacgtctgaaggctgagaagatcgttacccggctgttgtctacgggaaggttagtaacttttagtgaaaggtgatttcattgatccgagaggtgaccccgacctctcagaaactagtgatgagtgtccacatccctcttatggtaacataaggtggtcgctgcgctggcactagggcccaaaaggcatgaatgaaccaagatctgattgtgaagacccaactgtgcacttcagtattcctccggcccctgaatgcggctaatcctaacccatctgcatgtgcctacaacccagtaggtagcatgtcgtaatgcgtaagagatggatggaaccgactactttgggtgaccgtgtttcttttatttttatcaagtctcttatggtcacaagcatagaaaacaagatgcctgtgatcacacgtgagacatccaat

SEQ ID NO: 22745 - DNA, 567 bp, synthetic construct
  source 1..567: mol_type = other DNA
gccacattctttatttatcaactattgatctttgtaactaagtttaagccagagttctattatggttccacatccagtgggattcagaacaagtacttctgttaccccggtcattattagctgttaagacgtacccacgtctgaaggctgagaagatcgttacccggctgttgtctacgggaaggttagtaacttttagtgaaaggtgatttcattgatccgagaggtgaccccgacctctcagaaactagtgatgagtgtccacatccctcttatggtaacataaggtggtcgctgcgctggcactagggcccaaaaggcatgaatgaaccaagatctgattgtgaagacccaactgtgcacttcagtattcctccggcccctgaatgcggctaatcctaacccatctgcatgtgcctacaacccagtaggtagcatgtcgtaatgcgtaagagatggatggaaccgactactttgggtgaccgtgtttcttttatttttatcaagtctcttatggtcacaagcatagaaaacaagatgcctgtgatcacacgtgagacatccaat

SEQ ID NO: 22746 - DNA, 517 bp, synthetic construct
  source 1..517: mol_type = other DNA
agagttctattatggttccacatccagtgggattcagaacaagtacttctgttaccccggtcattattagctgttaagacgtacccacgtctgaaggctgagaagatcgttacccggctgttgtctacgggaaggttagtaacttttagtgaaaggtgatttcattgatccgagaggtgaccccgacctctcagaaactagtgatgagtgtccacatccctcttatggtaacataaggtggtcgctgcgctggcactagggcccaaaaggcatgaatgaaccaagatctgattgtgaagacccaactgtgcacttcagtattcctccggcccctgaatgcggctaatcctaacccatctgcatgtgcctacaacccagtaggtagcatgtcgtaatgcgtaagagatggatggaaccgactactttgggtgaccgtgtttcttttatttttatcaagtctcttatggtcacaagcatagaaaacaagatgcctgtgatcacacgtgagacatccaat

SEQ ID NO: 22747 - DNA, 622 bp, synthetic construct
  source 1..622: mol_type = other DNA
gtacaccggtatctcggtacccttgtacgcctgttttatcttccctccccaaaagtaactttagaagcaagtaaactcacagctcaatagccgtcgcaccgccagtgcgactatgagcaagcactcctgtttccccggttgcgtcctatatgctgtggaaacggcagaaggggacaatatcgttacccgcttatctactacgggaagcctagtaacaccattgaacactttgagggttgcgttcagcgccaaacccggcgtagctcaggccgatggggcttcggaatccccacgggtgaccgtgtcgaagcccgcgttggcggcctgcccacaccaatgggtgtgggacgctcaatttgtgacatggtgcgaagagcctactgtgctaggtgagagtcctccggcccctgaatgtggctaatcccaaccaccgaacccgtggttgcaatccagcaactagcgggccgtaatgcgcaagtcggtgacggaaccaactactttgggtgaccgtgtttcctttatctcttatattgcaattttatggtgacatttatagtatttaagtgttaccatatattgcgcaaacatattgtaataatacagagttactactgcagaaatc

SEQ ID NO: 22748 - DNA, 572 bp, synthetic construct
  source 1..572: mol_type = other DNA
aaaagtaactttagaagcaagtaaactcacagctcaatagccgtcgcaccgccagtgcgactatgagcaagcactcctgtttccccggttgcgtcctatatgctgtggaaacggcagaaggggacaatatcgttacccgcttatctactacgggaagcctagtaacaccattgaacactttgagggttgcgttcagcgccaaacccggcgtagctcaggccgatggggcttcggaatccccacgggtgaccgtgtcgaagcccgcgttggcggcctgcccacaccaatgggtgtgggacgctcaatttgtgacatggtgcgaagagcctactgtgctaggtgagagtcctccggcccctgaatgtggctaatcccaaccaccgaacccgtggttgcaatccagcaactagcgggccgtaatgcgcaagtcggtgacggaaccaactactttgggtgaccgtgtttcctttatctcttatattgcaattttatggtgacatttatagtatttaagtgttaccatatattgcgcaaacatattgtaataatacagagttactactgcagaaatc

SEQ ID NO: 22749 - DNA, 522 bp, synthetic construct
  source 1..522: mol_type = other DNA
gccagtgcgactatgagcaagcactcctgtttccccggttgcgtcctatatgctgtggaaacggcagaaggggacaatatcgttacccgcttatctactacgggaagcctagtaacaccattgaacactttgagggttgcgttcagcgccaaacccggcgtagctcaggccgatggggcttcggaatccccacgggtgaccgtgtcgaagcccgcgttggcggcctgcccacaccaatgggtgtgggacgctcaatttgtgacatggtgcgaagagcctactgtgctaggtgagagtcctccggcccctgaatgtggctaatcccaaccaccgaacccgtggttgcaatccagcaactagcgggccgtaatgcgcaagtcggtgacggaaccaactactttgggtgaccgtgtttcctttatctcttatattgcaattttatggtgacatttatagtatttaagtgttaccatatattgcgcaaacatattgtaataatacagagttactactgcagaaatc

SEQ ID NO: 22750 - DNA, 623 bp, synthetic construct
  source 1..623: mol_type = other DNA
ttttacccccccttccccattgtaacttagaagataatcaaacagttcaatagtcgggctgccacccaggtagcttactgaacaagcacttctgttaccccggtcttagtacctgagaagctgtacccacggcggaaggggaaagtgatcgttacccggctatctacttcgagaagcctagtaacaccattgaacttgctgagtgttgcgctccacacagtaaccccctgtgtagctttggctgatgagtctgggcattccccactggcgacagtggcccaggctgcgttggcggccaaccgatccaggcaactgggtcggacgctgagtaacggacatggtgtgaagagcctattgagctagatagtagtcctccggcccctgaatgcggctaatcctaaccccggagcaggtacgcacaatccagtgtggagcctgtcgtaatgcgtaagtccgggacggaaccgactactttgggtgtccgtgtttcctgttttatttaccttggctgcttatggtgacaaactagtgttgtcatcatatagcgtttggattggccatccggttttgtacacgagtgtttcactacccgagactctatcacctctaccttattgagaaaa

SEQ ID NO: 22751 - DNA, 573 bp, synthetic construct
  source 1..573: mol_type = other DNA
tagtcgggctgccacccaggtagcttactgaacaagcacttctgttaccccggtcttagtacctgagaagctgtacccacggcggaaggggaaagtgatcgttacccggctatctacttcgagaagcctagtaacaccattgaacttgctgagtgttgcgctccacacagtaaccccctgtgtagctttggctgatgagtctgggcattccccactggcgacagtggcccaggctgcgttggcggccaaccgatccaggcaactgggtcggacgctgagtaacggacatggtgtgaagagcctattgagctagatagtagtcctccggcccctgaatgcggctaatcctaaccccggagcaggtacgcacaatccagtgtggagcctgtcgtaatgcgtaagtccgggacggaaccgactactttgggtgtccgtgtttcctgttttatttaccttggctgcttatggtgacaaactagtgttgtcatcatatagcgtttggattggccatccggttttgtacacgagtgtttcactacccgagactctatcacctctaccttattgagaaaa

SEQ ID NO: 22752 - DNA, 523 bp, synthetic construct
  source 1..523: mol_type = other DNA
cggtcttagtacctgagaagctgtacccacggcggaaggggaaagtgatcgttacccggctatctacttcgagaagcctagtaacaccattgaacttgctgagtgttgcgctccacacagtaaccccctgtgtagctttggctgatgagtctgggcattccccactggcgacagtggcccaggctgcgttggcggccaaccgatccaggcaactgggtcggacgctgagtaacggacatggtgtgaagagcctattgagctagatagtagtcctccggcccctgaatgcggctaatcctaaccccggagcaggtacgcacaatccagtgtggagcctgtcgtaatgcgtaagtccgggacggaaccgactactttgggtgtccgtgtttcctgttttatttaccttggctgcttatggtgacaaactagtgttgtcatcatatagcgtttggattggccatccggttttgtacacgagtgtttcactacccgagactctatcacctctaccttattgagaaaa

SEQ ID NO: 22753 - DNA, 625 bp, synthetic construct
  source 1..625: mol_type = other DNA
ccaagttcaatagaagggggtacaaaccagtaccaccacgaacaagcacttctgtttccccggtaaagttgcatagactgtacccacggttgaaggcgactgatccgttatccgctcttgtacttcgagaagcctagtaacatcttggaatcttcgatgcgttgcgctcatcactcaaccccagagtgtagcttaggtcgatgagtctggacattccccaccggtgacggtggtccaggctgcgttggcggcctacctgtggtccaaagccacaggacgctagttgtgaacaaggtgtgaagagcctattgagctacaagagagtcctccggcccctgaatgcggctaatctcaaccacggagcaagtgctcacaaaccagtgagtggcttgtcgtaacgggtaactctgtggcggaaccgactactttgggtgtccgtgtttccttttatttttataatggctgcttatggtgacaatcacagattgttatcataaagcgaattggattggccatccggtgaaagtgagatatattatttatctttttgttggatttactccgattacttctttcacttacaaaatcatcaccacagttttgctaattagaaatacataccata

SEQ ID NO: 22754 - DNA, 575 bp, synthetic construct
  source 1..575: mol_type = other DNA
tctgtttccccggtaaagttgcatagactgtacccacggttgaaggcgactgatccgttatccgctcttgtacttcgagaagcctagtaacatcttggaatcttcgatgcgttgcgctcatcactcaaccccagagtgtagcttaggtcgatgagtctggacattccccaccggtgacggtggtccaggctgcgttggcggcctacctgtggtccaaagccacaggacgctagttgtgaacaaggtgtgaagagcctattgagctacaagagagtcctccggcccctgaatgcggctaatctcaaccacggagcaagtgctcacaaaccagtgagtggcttgtcgtaacgggtaactctgtggcggaaccgactactttgggtgtccgtgtttccttttatttttataatggctgcttatggtgacaatcacagattgttatcataaagcgaattggattggccatccggtgaaagtgagatatattatttatctttttgttggatttactccgattacttctttcacttacaaaatcatcaccacagttttgctaattagaaatacataccata

SEQ ID NO: 22755 - DNA, 525 bp, synthetic construct
  source 1..525: mol_type = other DNA
tgatccgttatccgctcttgtacttcgagaagcctagtaacatcttggaatcttcgatgcgttgcgctcatcactcaaccccagagtgtagcttaggtcgatgagtctggacattccccaccggtgacggtggtccaggctgcgttggcggcctacctgtggtccaaagccacaggacgctagttgtgaacaaggtgtgaagagcctattgagctacaagagagtcctccggcccctgaatgcggctaatctcaaccacggagcaagtgctcacaaaccagtgagtggcttgtcgtaacgggtaactctgtggcggaaccgactactttgggtgtccgtgtttccttttatttttataatggctgcttatggtgacaatcacagattgttatcataaagcgaattggattggccatccggtgaaagtgagatatattatttatctttttgttggatttactccgattacttctttcacttacaaaatcatcaccacagttttgctaattagaaatacataccata

SEQ ID NO: 22756 - DNA, 632 bp, synthetic construct
  source 1..632: mol_type = other DNA
agaagtttgaatcatacggtcaatagacaacccagtgcaccagctgggccctgaccaagcacttctgttgccccggaccgagtatcaataagctgctcacgcggctgaaggagaaaacgttcgttacccggccatttacttcgagaaacctagtaacaccatgaaggtagcgcagcgtttcgctccgcacaaccccagtgtagatcaggtcgatgagccaccgcactccccacgggtgaccgtggcggtggctgcgttggcggcctgcccatggggcaacccatgggacgcttcaatactgacatggtgcgaagagtctattgagctaaatggtagtcctccggcccctgaatgcggctaatcccaactgcggagcagatacccacacaccagtgggcagtctgtcgtaacgggcaactctgcagcggaaccgactactttgggtgtccgtgtttccttttattctcacattgactgcttatggtgacaattgaaagattgttaccatatagctattggattggccatccagtgacaaacagagcaattgtgtatctttttgttggtttcataccactgaactgcaaagttttgaaaacccttgacctcattttgctactcaacacaacaaa

SEQ ID NO: 22757 - DNA, 582 bp, synthetic construct
  source 1..582: mol_type = other DNA
ctgaccaagcacttctgttgccccggaccgagtatcaataagctgctcacgcggctgaaggagaaaacgttcgttacccggccatttacttcgagaaacctagtaacaccatgaaggtagcgcagcgtttcgctccgcacaaccccagtgtagatcaggtcgatgagccaccgcactccccacgggtgaccgtggcggtggctgcgttggcggcctgcccatggggcaacccatgggacgcttcaatactgacatggtgcgaagagtctattgagctaaatggtagtcctccggcccctgaatgcggctaatcccaactgcggagcagatacccacacaccagtgggcagtctgtcgtaacgggcaactctgcagcggaaccgactactttgggtgtccgtgtttccttttattctcacattgactgcttatggtgacaattgaaagattgttaccatatagctattggattggccatccagtgacaaacagagcaattgtgtatctttttgttggtttcataccactgaactgcaaagttttgaaaacccttgacctcattttgctactcaacacaacaaa

SEQ ID NO: 22758 - DNA, 532 bp, synthetic construct
  source 1..532: mol_type = other DNA
gcggctgaaggagaaaacgttcgttacccggccatttacttcgagaaacctagtaacaccatgaaggtagcgcagcgtttcgctccgcacaaccccagtgtagatcaggtcgatgagccaccgcactccccacgggtgaccgtggcggtggctgcgttggcggcctgcccatggggcaacccatgggacgcttcaatactgacatggtgcgaagagtctattgagctaaatggtagtcctccggcccctgaatgcggctaatcccaactgcggagcagatacccacacaccagtgggcagtctgtcgtaacgggcaactctgcagcggaaccgactactttgggtgtccgtgtttccttttattctcacattgactgcttatggtgacaattgaaagattgttaccatatagctattggattggccatccagtgacaaacagagcaattgtgtatctttttgttggtttcataccactgaactgcaaagttttgaaaacccttgacctcattttgctactcaacacaacaaa

SEQ ID NO: 22759 - DNA, 633 bp, synthetic construct
  source 1..633: mol_type = other DNA
ggccacgcccgggccaccgatacttcccttcactccttcgggactgttggggaggaacacaacagggctcccctgttttcccattccttcccccttttcccaaccccaaccgccgtatctggtggcggcaagacacacgggtctttccctctaaagcacaattgtgtgtgtgtcccaggtcctcctgcgtacggtgcgggagtgctcccacccaactgttgtaagcctgtccaacgcgtcgtcctggcaagactatgacgtcgcatgttccgctgcggatgccgaccgggtaaccggttccccagtgtgtgtagtgcgatcttccaggtcctcctggttggcgttgtccagaaactgcttcaggtaagtggggtgtgcccaatccctacaaaggttgattctttcaccaccttaggaatgctccggaggtaccccagcaacagctgggatctgaccggaggctaattgtctacgggtggtgtttcctttttcttttcacacaactctactgctgacaactcactgactatccacttgctctcttgtgcctttctgctctggttcaagttccttgattgtttttgactgcttttcactgcttttcttctcacaatccttgctcagttcaaagtc

SEQ ID NO: 22760 - DNA, 583 bp, synthetic construct
  source 1..583: mol_type = other DNA
ggaggaacacaacagggctcccctgttttcccattccttcccccttttcccaaccccaaccgccgtatctggtggcggcaagacacacgggtctttccctctaaagcacaattgtgtgtgtgtcccaggtcctcctgcgtacggtgcgggagtgctcccacccaactgttgtaagcctgtccaacgcgtcgtcctggcaagactatgacgtcgcatgttccgctgcggatgccgaccgggtaaccggttccccagtgtgtgtagtgcgatcttccaggtcctcctggttggcgttgtccagaaactgcttcaggtaagtggggtgtgcccaatccctacaaaggttgattctttcaccaccttaggaatgctccggaggtaccccagcaacagctgggatctgaccggaggctaattgtctacgggtggtgtttcctttttcttttcacacaactctactgctgacaactcactgactatccacttgctctcttgtgcctttctgctctggttcaagttccttgattgtttttgactgcttttcactgcttttcttctcacaatccttgctcagttcaaagtc

SEQ ID NO: 22761 - DNA, 533 bp, synthetic construct
  source 1..533: mol_type = other DNA
caaccccaaccgccgtatctggtggcggcaagacacacgggtctttccctctaaagcacaattgtgtgtgtgtcccaggtcctcctgcgtacggtgcgggagtgctcccacccaactgttgtaagcctgtccaacgcgtcgtcctggcaagactatgacgtcgcatgttccgctgcggatgccgaccgggtaaccggttccccagtgtgtgtagtgcgatcttccaggtcctcctggttggcgttgtccagaaactgcttcaggtaagtggggtgtgcccaatccctacaaaggttgattctttcaccaccttaggaatgctccggaggtaccccagcaacagctgggatctgaccggaggctaattgtctacgggtggtgtttcctttttcttttcacacaactctactgctgacaactcactgactatccacttgctctcttgtgcctttctgctctggttcaagttccttgattgtttttgactgcttttcactgcttttcttctcacaatccttgctcagttcaaagtc

SEQ ID NO: 22762 - DNA, 636 bp, synthetic construct
  source 1..636: mol_type = other DNA
gtacgcctgttttatatcccttccccatgtaactttagaagcaattcacatagttcaatagagggggtacaaaccagtgccaccacgaacaagcacttctgtttccccggtgaagctgtatagactgtccccacggtcaaaaacggcagatccgttatccgctcatgtacttcgagaagcctagtagcatcttggaatcttcgatgcgttgcgttcagcactctaccccgagtgtagcttaggtcgatgagtctgggcataccccaccggcgacggtggcccaggctgcgttggcggcctacccatggctaacgccatgggacgctagttgtgaacaaggtgtgaagagcctattgagctacatgagagtcctccggcccctgaatgcggctaatcctaaccacggagcaagtactcacaacccagtgagcagcttgtcgtaacgcgtaagtctgtggcggaaccgactactttgggtgtccgtgtttccttttatttttgatatggctgcttatggtgacaatcaaagattgttatcatatagcttttggattggccatccggtgatttttgagactataacgtttacttgccttaccacacaacttagtactttgctacattcacacagtcata

SEQ ID NO: 22763 - DNA, 586 bp, synthetic construct
  source 1..586: mol_type = other DNA
tagttcaatagagggggtacaaaccagtgccaccacgaacaagcacttctgtttccccggtgaagctgtatagactgtccccacggtcaaaaacggcagatccgttatccgctcatgtacttcgagaagcctagtagcatcttggaatcttcgatgcgttgcgttcagcactctaccccgagtgtagcttaggtcgatgagtctgggcataccccaccggcgacggtggcccaggctgcgttggcggcctacccatggctaacgccatgggacgctagttgtgaacaaggtgtgaagagcctattgagctacatgagagtcctccggcccctgaatgcggctaatcctaaccacggagcaagtactcacaacccagtgagcagcttgtcgtaacgcgtaagtctgtggcggaaccgactactttgggtgtccgtgtttccttttatttttgatatggctgcttatggtgacaatcaaagattgttatcatatagcttttggattggccatccggtgatttttgagactataacgtttacttgccttaccacacaacttagtactttgctacattcacacagtcata

SEQ ID NO: 22764 - DNA, 536 bp, synthetic construct
  source 1..536: mol_type = other DNA
gtttccccggtgaagctgtatagactgtccccacggtcaaaaacggcagatccgttatccgctcatgtacttcgagaagcctagtagcatcttggaatcttcgatgcgttgcgttcagcactctaccccgagtgtagcttaggtcgatgagtctgggcataccccaccggcgacggtggcccaggctgcgttggcggcctacccatggctaacgccatgggacgctagttgtgaacaaggtgtgaagagcctattgagctacatgagagtcctccggcccctgaatgcggctaatcctaaccacggagcaagtactcacaacccagtgagcagcttgtcgtaacgcgtaagtctgtggcggaaccgactactttgggtgtccgtgtttccttttatttttgatatggctgcttatggtgacaatcaaagattgttatcatatagcttttggattggccatccggtgatttttgagactataacgtttacttgccttaccacacaacttagtactttgctacattcacacagtcata

SEQ ID NO: 22765 - DNA, 639 bp, synthetic construct
  source 1..639: mol_type = other DNA
ctttgtacgcctgttttataccccctccccaagtaactttagaagcaattcacaaagttcaatagagggggtacaaaccagtaccaccacgaacaagcacttctgtttccccggtgaagctacatagactgtccccacggtcgaaggtggcagatccgttatccgctcaagtacttcgagaagcctagtaccaccttggaatcttcgatgcgttgcgctcagcactctaccccgagtgtagcttaggtcgatgagtctgggcatgccccaccggtgacggtggcccaggctgcgttggcggcctacccgtggctaacgccatgggacgctagttgtgaacaaggtgtgaagagcctattgagctacttgagagtcctccggcccctgaatgcggctaatcctaaccacggagcaagtgctcacaaaccagtgagtggcttgtcgtaacgcgtaagtctgtggcggaaccgactactttgggtgtccgtgtttccttttattttcattatggctgcttatggtgacaatctaagattgttatcatatagcttttggattggccatccggtgatttgaaagagatatatttaccttattgttctaccatatctaattactcatcacagccacataatcaca

SEQ ID NO: 22766 - DNA, 589 bp, synthetic construct
  source 1..589: mol_type = other DNA
cacaaagttcaatagagggggtacaaaccagtaccaccacgaacaagcacttctgtttccccggtgaagctacatagactgtccccacggtcgaaggtggcagatccgttatccgctcaagtacttcgagaagcctagtaccaccttggaatcttcgatgcgttgcgctcagcactctaccccgagtgtagcttaggtcgatgagtctgggcatgccccaccggtgacggtggcccaggctgcgttggcggcctacccgtggctaacgccatgggacgctagttgtgaacaaggtgtgaagagcctattgagctacttgagagtcctccggcccctgaatgcggctaatcctaaccacggagcaagtgctcacaaaccagtgagtggcttgtcgtaacgcgtaagtctgtggcggaaccgactactttgggtgtccgtgtttccttttattttcattatggctgcttatggtgacaatctaagattgttatcatatagcttttggattggccatccggtgatttgaaagagatatatttaccttattgttctaccatatctaattactcatcacagccacataatcaca

SEQ ID NO: 22767 - DNA, 539 bp, synthetic construct
  source 1..539: mol_type = other DNA
ttctgtttccccggtgaagctacatagactgtccccacggtcgaaggtggcagatccgttatccgctcaagtacttcgagaagcctagtaccaccttggaatcttcgatgcgttgcgctcagcactctaccccgagtgtagcttaggtcgatgagtctgggcatgccccaccggtgacggtggcccaggctgcgttggcggcctacccgtggctaacgccatgggacgctagttgtgaacaaggtgtgaagagcctattgagctacttgagagtcctccggcccctgaatgcggctaatcctaaccacggagcaagtgctcacaaaccagtgagtggcttgtcgtaacgcgtaagtctgtggcggaaccgactactttgggtgtccgtgtttccttttattttcattatggctgcttatggtgacaatctaagattgttatcatatagcttttggattggccatccggtgatttgaaagagatatatttaccttattgttctaccatatctaattactcatcacagccacataatcaca

SEQ ID NO: 22768 - DNA, 639 bp, synthetic construct
  source 1..639: mol_type = other DNA
caacttagaattataactaaaccggccaatagaaagctcggcaaaccagccgagttctggtcaagcacttctgttgccccggactgagtatcaataagctgctcgcgcggctgaaggagaaaacgttcgttacccgaccaactacttcgagaaacccagtatcaccatgaaagctgcgtagcgtttcgttccgcacaaccccagtgtagatcaggccgatgagtcaccgcaatccccacgggcgaccgtggcggtggctgcgctggcggcctgcccatggggcgacccatgggacgcttcaataccgacatggtgtgaagagtctattgagctagttggtagtcctccggcccctgaatgcggctaatcccaactgcggagcagacgcttgcataccagcaagtagtctgtcgtaacgggcaactctgcagcggaaccgactactttgggtgtccgtgtttccttttattttttatactggctgcttatggtgacaattgaaagattgttgccatatagctattggattggccatccggtgacgaacagagctatcatatactcttttgttgggtttgtcccattgaactacaaggcattgaataccctcaatttcattctagcactaaatacaataaa

SEQ ID NO: 22769 - DNA, 589 bp, synthetic construct
  source 1..589: mol_type = other DNA
cgagttctggtcaagcacttctgttgccccggactgagtatcaataagctgctcgcgcggctgaaggagaaaacgttcgttacccgaccaactacttcgagaaacccagtatcaccatgaaagctgcgtagcgtttcgttccgcacaaccccagtgtagatcaggccgatgagtcaccgcaatccccacgggcgaccgtggcggtggctgcgctggcggcctgcccatggggcgacccatgggacgcttcaataccgacatggtgtgaagagtctattgagctagttggtagtcctccggcccctgaatgcggctaatcccaactgcggagcagacgcttgcataccagcaagtagtctgtcgtaacgggcaactctgcagcggaaccgactactttgggtgtccgtgtttccttttattttttatactggctgcttatggtgacaattgaaagattgttgccatatagctattggattggccatccggtgacgaacagagctatcatatactcttttgttgggtttgtcccattgaactacaaggcattgaataccctcaatttcattctagcactaaatacaataaa

SEQ ID NO: 22770 - DNA, 539 bp, synthetic construct
  source 1..539: mol_type = other DNA
gctcgcgcggctgaaggagaaaacgttcgttacccgaccaactacttcgagaaacccagtatcaccatgaaagctgcgtagcgtttcgttccgcacaaccccagtgtagatcaggccgatgagtcaccgcaatccccacgggcgaccgtggcggtggctgcgctggcggcctgcccatggggcgacccatgggacgcttcaataccgacatggtgtgaagagtctattgagctagttggtagtcctccggcccctgaatgcggctaatcccaactgcggagcagacgcttgcataccagcaagtagtctgtcgtaacgggcaactctgcagcggaaccgactactttgggtgtccgtgtttccttttattttttatactggctgcttatggtgacaattgaaagattgttgccatatagctattggattggccatccggtgacgaacagagctatcatatactcttttgttgggtttgtcccattgaactacaaggcattgaataccctcaatttcattctagcactaaatacaataaa

SEQ ID NO: 22771 - DNA, 643 bp, synthetic construct
  source 1..643: mol_type = other DNA
cagtaacttagaagtcataaactcacatgaccaatagtgggcatgacgcaccagtcatgtctcggtcaagcacttctgtctccccggactgagtatcaataagctacttgcgtggctgaaggagaaaacgttcgttatccggctaactacttcgagaagcttagtagcaccatgaaagttgcggagtgtttcgctcagcacttcccccgtgtagatcaggtcgatgagtcactgcgttcctcacgggagaccgtggcagtggctgcgttggcggcctgcctatggggcaacccataggacgctctaatatggacatggtgtgaagagcctattgagctagttagtggtcctccggcccctgaatgcggctaatcctaactgcggagcacataccctcaacccagggggcagtgtgtcgtaacgggcaactctgcagcggaaccgactactttgggagtccgtgtttccttttattcttatattggctgcttatggtgacaattgagagattgttaccatatagctactggattggccacccggtgtctaatagagccctggtttaccaatttattggatttgtgcctttatcacccacagtttattcaaccttagtatttttgatatatcttaacaataggcg

SEQ ID NO: 22772 - DNA, 593 bp, synthetic construct
  source 1..593: mol_type = other DNA
ccagtcatgtctcggtcaagcacttctgtctccccggactgagtatcaataagctacttgcgtggctgaaggagaaaacgttcgttatccggctaactacttcgagaagcttagtagcaccatgaaagttgcggagtgtttcgctcagcacttcccccgtgtagatcaggtcgatgagtcactgcgttcctcacgggagaccgtggcagtggctgcgttggcggcctgcctatggggcaacccataggacgctctaatatggacatggtgtgaagagcctattgagctagttagtggtcctccggcccctgaatgcggctaatcctaactgcggagcacataccctcaacccagggggcagtgtgtcgtaacgggcaactctgcagcggaaccgactactttgggagtccgtgtttccttttattcttatattggctgcttatggtgacaattgagagattgttaccatatagctactggattggccacccggtgtctaatagagccctggtttaccaatttattggatttgtgcctttatcacccacagtttattcaaccttagtatttttgatatatcttaacaataggcg

SEQ ID NO: 22773 - DNA, 543 bp, synthetic construct
  source 1..543: mol_type = other DNA
aagctacttgcgtggctgaaggagaaaacgttcgttatccggctaactacttcgagaagcttagtagcaccatgaaagttgcggagtgtttcgctcagcacttcccccgtgtagatcaggtcgatgagtcactgcgttcctcacgggagaccgtggcagtggctgcgttggcggcctgcctatggggcaacccataggacgctctaatatggacatggtgtgaagagcctattgagctagttagtggtcctccggcccctgaatgcggctaatcctaactgcggagcacataccctcaacccagggggcagtgtgtcgtaacgggcaactctgcagcggaaccgactactttgggagtccgtgtttccttttattcttatattggctgcttatggtgacaattgagagattgttaccatatagctactggattggccacccggtgtctaatagagccctggtttaccaatttattggatttgtgcctttatcacccacagtttattcaaccttagtatttttgatatatcttaacaataggcg

SEQ ID NO: 22774 - DNA, 643 bp, synthetic construct
  source 1..643: mol_type = other DNA
aacttagaagcaagcaaaccaagttcaatagaagggggtacaaaccagtaccaccacgaacaagcacttctgtttccccggtgaggttgcatagactgtacccacggtcaaaagcgattgatccgttatccgctctagtacttcgagaagcctagtatcaccttgggatcttcgatgcgttgcgctctgcactcgaccccggagtgtagcttaggtcgatgagtctggacacccctcaccggtgacggtggtccaggctgcgttggcggcctacctgtggcccaaagccacaggacgctagttgtgaacaaggtgtgaagagcctattgagctaccagagagtcctccggcccctgaatgcggctaatcccaaccacggagcaagtgctctcaaaccagagagtggcttgtcgtaacgcgcaagtctgtggcggaaccgactactttgggtgaccgtgtttccttttatttttatcatggctgcttatggtgacaatctcagattgttatcataaagcaaattggattagccatccggtgaaagtcaaatcgattatttacttatttattggtttttctccactaacaccacaaacacttaaaattattgaaatagtgctgctaattagataccactatcata

SEQ ID NO: 22775 - DNA, 593 bp, synthetic construct
  source 1..593: mol_type = other DNA
ccaccacgaacaagcacttctgtttccccggtgaggttgcatagactgtacccacggtcaaaagcgattgatccgttatccgctctagtacttcgagaagcctagtatcaccttgggatcttcgatgcgttgcgctctgcactcgaccccggagtgtagcttaggtcgatgagtctggacacccctcaccggtgacggtggtccaggctgcgttggcggcctacctgtggcccaaagccacaggacgctagttgtgaacaaggtgtgaagagcctattgagctaccagagagtcctccggcccctgaatgcggctaatcccaaccacggagcaagtgctctcaaaccagagagtggcttgtcgtaacgcgcaagtctgtggcggaaccgactactttgggtgaccgtgtttccttttatttttatcatggctgcttatggtgacaatctcagattgttatcataaagcaaattggattagccatccggtgaaagtcaaatcgattatttacttatttattggtttttctccactaacaccacaaacacttaaaattattgaaatagtgctgctaattagataccactatcata

SEQ ID NO: 22776 - DNA, 543 bp, synthetic construct
  source 1..543: mol_type = other DNA
cccacggtcaaaagcgattgatccgttatccgctctagtacttcgagaagcctagtatcaccttgggatcttcgatgcgttgcgctctgcactcgaccccggagtgtagcttaggtcgatgagtctggacacccctcaccggtgacggtggtccaggctgcgttggcggcctacctgtggcccaaagccacaggacgctagttgtgaacaaggtgtgaagagcctattgagctaccagagagtcctccggcccctgaatgcggctaatcccaaccacggagcaagtgctctcaaaccagagagtggcttgtcgtaacgcgcaagtctgtggcggaaccgactactttgggtgaccgtgtttccttttatttttatcatggctgcttatggtgacaatctcagattgttatcataaagcaaattggattagccatccggtgaaagtcaaatcgattatttacttatttattggtttttctccactaacaccacaaacacttaaaattattgaaatagtgctgctaattagataccactatcata

SEQ ID NO: 22777 - DNA, 644 bp, synthetic construct
  source 1..644: mol_type = other DNA
aacttagaaaacttcaaaatcaaagttcaataggagggggtacaaaccagtaccaccacgaacaagcacttctgtttccccggtgatgttgtatagactgtctccacggttgaaaacgactgatccgttatccgctctagtacttcgagaagcccagtaccaccttggaatcttcgatgcgttgcgctcagcactcaatcccagagtgtagcttaggttgatgagtctggacatccctcaccggcgacggtggtccaggctgcgttggcggcctacctgtggcccaaagccacaggacgctagttgtgaacaaggtgcgaagagcctattgagctactagagattcctccggcccctgaatgcggctaatcccaaccacggagcaggtactcacaacccagtgagcagcctgtcgtaacgcgcaagtctgtggcggaaccgactactttgggtgtccgtgtttccttttatttttatatggctgcttatggtgacaatcattgattgttatcataaagcgaattggattggccatccggtgaaagttagacttatcatttacttgtttgttggattcactcctttgactaaattcacccctgacatcatcttagttgtgatactgattaggagacttcatcata

SEQ ID NO: 22778 - DNA, 594 bp, synthetic construct
  source 1..594: mol_type = other DNA
taccaccacgaacaagcacttctgtttccccggtgatgttgtatagactgtctccacggttgaaaacgactgatccgttatccgctctagtacttcgagaagcccagtaccaccttggaatcttcgatgcgttgcgctcagcactcaatcccagagtgtagcttaggttgatgagtctggacatccctcaccggcgacggtggtccaggctgcgttggcggcctacctgtggcccaaagccacaggacgctagttgtgaacaaggtgcgaagagcctattgagctactagagattcctccggcccctgaatgcggctaatcccaaccacggagcaggtactcacaacccagtgagcagcctgtcgtaacgcgcaagtctgtggcggaaccgactactttgggtgtccgtgtttccttttatttttatatggctgcttatggtgacaatcattgattgttatcataaagcgaattggattggccatccggtgaaagttagacttatcatttacttgtttgttggattcactcctttgactaaattcacccctgacatcatcttagttgtgatactgattaggagacttcatcata

SEQ ID NO: 22779 - DNA, 544 bp, synthetic construct
  source 1..544: mol_type = other DNA
tctccacggttgaaaacgactgatccgttatccgctctagtacttcgagaagcccagtaccaccttggaatcttcgatgcgttgcgctcagcactcaatcccagagtgtagcttaggttgatgagtctggacatccctcaccggcgacggtggtccaggctgcgttggcggcctacctgtggcccaaagccacaggacgctagttgtgaacaaggtgcgaagagcctattgagctactagagattcctccggcccctgaatgcggctaatcccaaccacggagcaggtactcacaacccagtgagcagcctgtcgtaacgcgcaagtctgtggcggaaccgactactttgggtgtccgtgtttccttttatttttatatggctgcttatggtgacaatcattgattgttatcataaagcgaattggattggccatccggtgaaagttagacttatcatttacttgtttgttggattcactcctttgactaaattcacccctgacatcatcttagttgtgatactgattaggagacttcatcata

SEQ ID NO: 22780 - DNA, 645 bp, synthetic construct
  source 1..645: mol_type = other DNA
ttgaaacatagaagtgatgcgcaccattgatcaatagtaggcgtaacgcgccagttacgtctcgatcaagcacatctgtttccccggaccgagtatcaatagactgctcacgcggttgaaggagaaagcgttcgttacccggctaactacttcgagaaacccagtagcaccatggaagctgcagggtgtttcgctcagcacttcccccgtgtagatcaggtcgatgagccactgcaatccccacgggcgaccgtggcagtggctgcgttggcggcctgcctatggggagacccataggacgctctaatgtggacatggtgcgaagagtctattgagctagttagtagtcctccggcccctgaatgcggctaatcctaactgcggagcacatgccttcaacccagaaggtggtgtgtcgtaacgggcaactctgcagcggaaccgactactttgggtgtccgtgtttcctttcattcttatatcggctgcttatggtgacaattacggaattgttaccatatagctattggattggccatccggtgtgtaatagagctattatatatctgtttgttggctttgtgccattaactttaaagtctacaactactcttgattttatattgaccctcaacacagttaaac

SEQ ID NO: 22781 - DNA, 595 bp, synthetic construct
  source 1..595: mol_type = other DNA
ccagttacgtctcgatcaagcacatctgtttccccggaccgagtatcaatagactgctcacgcggttgaaggagaaagcgttcgttacccggctaactacttcgagaaacccagtagcaccatggaagctgcagggtgtttcgctcagcacttcccccgtgtagatcaggtcgatgagccactgcaatccccacgggcgaccgtggcagtggctgcgttggcggcctgcctatggggagacccataggacgctctaatgtggacatggtgcgaagagtctattgagctagttagtagtcctccggcccctgaatgcggctaatcctaactgcggagcacatgccttcaacccagaaggtggtgtgtcgtaacgggcaactctgcagcggaaccgactactttgggtgtccgtgtttcctttcattcttatatcggctgcttatggtgacaattacggaattgttaccatatagctattggattggccatccggtgtgtaatagagctattatatatctgtttgttggctttgtgccattaactttaaagtctacaactactcttgattttatattgaccctcaacacagttaaac

SEQ ID NO: 22782 - DNA, 545 bp, synthetic construct
  source 1..545: mol_type = other DNA
agactgctcacgcggttgaaggagaaagcgttcgttacccggctaactacttcgagaaacccagtagcaccatggaagctgcagggtgtttcgctcagcacttcccccgtgtagatcaggtcgatgagccactgcaatccccacgggcgaccgtggcagtggctgcgttggcggcctgcctatggggagacccataggacgctctaatgtggacatggtgcgaagagtctattgagctagttagtagtcctccggcccctgaatgcggctaatcctaactgcggagcacatgccttcaacccagaaggtggtgtgtcgtaacgggcaactctgcagcggaaccgactactttgggtgtccgtgtttcctttcattcttatatcggctgcttatggtgacaattacggaattgttaccatatagctattggattggccatccggtgtgtaatagagctattatatatctgtttgttggctttgtgccattaactttaaagtctacaactactcttgattttatattgaccctcaacacagttaaac

SEQ ID NO: 22783 - DNA, 647 bp, synthetic construct
  source 1..647: mol_type = other DNA
cccctaacgtaatttagaagcaagactttaacggtcattaggtggctcagcacaccagccgagtcaagaccaagcacttctgttaccccggactgagtatcaataagctgctcacgtggctgaaagagaaaacgttcgttacccggccaattacttcgagaaacctagtaccaccatggaggttgcgcagcgtttcgctccgcactaccccagtgtagatcaggtcgatgagtcaccgcattccccacgggcgaccgtggcggtggctgcgttggcggcctgcccatggggaaacctatgggacgcttcaatactgacatggtgtgaagagtctattgagctaattggtaatcctccggcccctgaatgcggctaatcctaactgcggagcagacacccacaagccagtgagcagtctgtcgtaacgggcaactctgcagcggaaccgactactttgggtgtccgtgtttccttttattccattactggctgcttatggtgacaattgagagattgttaccatatagctattggattggccatccggtgagcaacagagcacttatatatctctttgttggattcataccactagacaccaggagttttacgtctttggtttatattttaaggttgaacacagcaaa

SEQ ID NO: 22784 - DNA, 597 bp, synthetic construct
  source 1..597: mol_type = other DNA
cacaccagccgagtcaagaccaagcacttctgttaccccggactgagtatcaataagctgctcacgtggctgaaagagaaaacgttcgttacccggccaattacttcgagaaacctagtaccaccatggaggttgcgcagcgtttcgctccgcactaccccagtgtagatcaggtcgatgagtcaccgcattccccacgggcgaccgtggcggtggctgcgttggcggcctgcccatggggaaacctatgggacgcttcaatactgacatggtgtgaagagtctattgagctaattggtaatcctccggcccctgaatgcggctaatcctaactgcggagcagacacccacaagccagtgagcagtctgtcgtaacgggcaactctgcagcggaaccgactactttgggtgtccgtgtttccttttattccattactggctgcttatggtgacaattgagagattgttaccatatagctattggattggccatccggtgagcaacagagcacttatatatctctttgttggattcataccactagacaccaggagttttacgtctttggtttatattttaaggttgaacacagcaaa

SEQ ID NO: 22785 - DNA, 547 bp, synthetic construct
  source 1..547: mol_type = other DNA
caataagctgctcacgtggctgaaagagaaaacgttcgttacccggccaattacttcgagaaacctagtaccaccatggaggttgcgcagcgtttcgctccgcactaccccagtgtagatcaggtcgatgagtcaccgcattccccacgggcgaccgtggcggtggctgcgttggcggcctgcccatggggaaacctatgggacgcttcaatactgacatggtgtgaagagtctattgagctaattggtaatcctccggcccctgaatgcggctaatcctaactgcggagcagacacccacaagccagtgagcagtctgtcgtaacgggcaactctgcagcggaaccgactactttgggtgtccgtgtttccttttattccattactggctgcttatggtgacaattgagagattgttaccatatagctattggattggccatccggtgagcaacagagcacttatatatctctttgttggattcataccactagacaccaggagttttacgtctttggtttatattttaaggttgaacacagcaaa

SEQ ID NO: 22786 - DNA, 648 bp, synthetic construct
  source 1..648: mol_type = other DNA
tactctggtattacggtacctttgtacgcctgttttacaacccttcccccatgtaacttagaagcaacaaataaacgaccaatagcacactcaccaatccagatgagtgatggtcaagcacttctgttaccccgggcttagtaccaatagactgccatcgcggttgaaggggaaaacgctcgttatccggctctctactgcgagaagcctagtaacgccttagaaatgctcaagcgttgcgctcagcacaaccccagtgtagctcaggtcgatgagtcactgcattccccacgggcgaccgtggcagtggctgcgtttgcggcctgcctacagctctacgctgtaggacgcttgtgtatggacatggtgtgaagagcccattgcgctagggagtagtcctccggcccctgaatgcggctaatcctaaccccggagctggtgcttgtaaaccaacaagtggccagtcgtaatgggcaactctgggatggaaccgactactttgggtgtccgtgtttcctgttttatttaccttggctgcttatggtgacaatctagtgttgttgccatatagcgattggattggccatccggatattgttttagacacttgtgtttgtgagtagatctcttctgacataggatataaca

SEQ ID NO: 22787 - DNA, 598 bp, synthetic construct
  source 1..598: mol_type = other DNA
atgtaacttagaagcaacaaataaacgaccaatagcacactcaccaatccagatgagtgatggtcaagcacttctgttaccccgggcttagtaccaatagactgccatcgcggttgaaggggaaaacgctcgttatccggctctctactgcgagaagcctagtaacgccttagaaatgctcaagcgttgcgctcagcacaaccccagtgtagctcaggtcgatgagtcactgcattccccacgggcgaccgtggcagtggctgcgtttgcggcctgcctacagctctacgctgtaggacgcttgtgtatggacatggtgtgaagagcccattgcgctagggagtagtcctccggcccctgaatgcggctaatcctaaccccggagctggtgcttgtaaaccaacaagtggccagtcgtaatgggcaactctgggatggaaccgactactttgggtgtccgtgtttcctgttttatttaccttggctgcttatggtgacaatctagtgttgttgccatatagcgattggattggccatccggatattgttttagacacttgtgtttgtgagtagatctcttctgacataggatataaca

SEQ ID NO: 22788 - DNA, 548 bp, synthetic construct
  source 1..548: mol_type = other DNA
agatgagtgatggtcaagcacttctgttaccccgggcttagtaccaatagactgccatcgcggttgaaggggaaaacgctcgttatccggctctctactgcgagaagcctagtaacgccttagaaatgctcaagcgttgcgctcagcacaaccccagtgtagctcaggtcgatgagtcactgcattccccacgggcgaccgtggcagtggctgcgtttgcggcctgcctacagctctacgctgtaggacgcttgtgtatggacatggtgtgaagagcccattgcgctagggagtagtcctccggcccctgaatgcggctaatcctaaccccggagctggtgcttgtaaaccaacaagtggccagtcgtaatgggcaactctgggatggaaccgactactttgggtgtccgtgtttcctgttttatttaccttggctgcttatggtgacaatctagtgttgttgccatatagcgattggattggccatccggatattgttttagacacttgtgtttgtgagtagatctcttctgacataggatataaca

SEQ ID NO: 22789 - DNA, 648 bp, synthetic construct
  source 1..648: mol_type = other DNA
gtactctggtacttcggtacctttgtacgcctgttttatctcccttcccaatgtaatttagaagctcttaaatcaaggctcaataggcggggcgcaacccagcgctctcatgagcaagcacttctgtctccccggtgtggttgtataaactgttcccacggttgaaaacaacctatccgttatccgctatagtacttcgagaaacctagtatcacctttggattgttgacgcgttgcgctcagcacactaacccgtgtgtagcttgggtcgatgagtctggacataccccactggcgacagtggtccaggctgcgttggcggcctactcatggtgaaaaccatgagacgctaaacatgaacaaggtgtgaagagtctattgagctactatagagtcctccggcccctgaatgcggctaatcctaaccatggagcaagcgctcacaagccagtgagttgcttgtcgtaatgcgcaagtccgtggcggaaccgactactttgggtgtccgtgtttcactttttacttttatgactgcttatggtgacaatttgatattgttaccatttagcttgtcaaattaattacaaaaggttctaaatcttacttaccaacctgcattttgataaccttgatttgaaaattttaata

SEQ ID NO: 22790 - DNA, 598 bp, synthetic construct
  source 1..598: mol_type = other DNA
atgtaatttagaagctcttaaatcaaggctcaataggcggggcgcaacccagcgctctcatgagcaagcacttctgtctccccggtgtggttgtataaactgttcccacggttgaaaacaacctatccgttatccgctatagtacttcgagaaacctagtatcacctttggattgttgacgcgttgcgctcagcacactaacccgtgtgtagcttgggtcgatgagtctggacataccccactggcgacagtggtccaggctgcgttggcggcctactcatggtgaaaaccatgagacgctaaacatgaacaaggtgtgaagagtctattgagctactatagagtcctccggcccctgaatgcggctaatcctaaccatggagcaagcgctcacaagccagtgagttgcttgtcgtaatgcgcaagtccgtggcggaaccgactactttgggtgtccgtgtttcactttttacttttatgactgcttatggtgacaatttgatattgttaccatttagcttgtcaaattaattacaaaaggttctaaatcttacttaccaacctgcattttgataaccttgatttgaaaattttaata

SEQ ID NO: 22791 - DNA, 548 bp, synthetic construct
  source 1..548: mol_type = other DNA
agcgctctcatgagcaagcacttctgtctccccggtgtggttgtataaactgttcccacggttgaaaacaacctatccgttatccgctatagtacttcgagaaacctagtatcacctttggattgttgacgcgttgcgctcagcacactaacccgtgtgtagcttgggtcgatgagtctggacataccccactggcgacagtggtccaggctgcgttggcggcctactcatggtgaaaaccatgagacgctaaacatgaacaaggtgtgaagagtctattgagctactatagagtcctccggcccctgaatgcggctaatcctaaccatggagcaagcgctcacaagccagtgagttgcttgtcgtaatgcgcaagtccgtggcggaaccgactactttgggtgtccgtgtttcactttttacttttatgactgcttatggtgacaatttgatattgttaccatttagcttgtcaaattaattacaaaaggttctaaatcttacttaccaacctgcattttgataaccttgatttgaaaattttaata

SEQ ID NO: 22792 - DNA, 649 bp, synthetic construct
  source 1..649: mol_type = other DNA
actctggtatcaaggtacctttgtacgcctattttatttcccttcccccacagtaacttagaagcttatctcatagttcaacagtagggtcactaaccaagtggctcagcgaacaagcacttctgtttccccggtcctagtacctgtgaagctgtacccacggcggaaggggaaaaagatcgttatccggccccctacttcggaaagcctagtaacaccattgaagcaatcgagtgttgcgctcagcacagtaacccctgtgtagctttggttgatgagtctgggcactccccactggcgacagcggcccaggctgcgttggcggccaaccgactcgggcaaccgggtcggacgctcgtttgtggacatggtgtgaagagcctactgagctagagggtagtcctccggcccctgaatgcggataatcctaaccccggagcacccacactcaatccagagtgcaggatgtcgtaacgcgtaagtctgggacggaaccgactactttgggtgtccgtgtttcctgttttacttactttggctgcttatggtgacaatctagtgttgttaccatatagctattggattggccatccggtgttttgaattgtgtgtttatactaattcttttacatatcacagacaaccaaat

SEQ ID NO: 22793 - DNA, 599 bp, synthetic construct
  source 1..599: mol_type = other DNA
cagtaacttagaagcttatctcatagttcaacagtagggtcactaaccaagtggctcagcgaacaagcacttctgtttccccggtcctagtacctgtgaagctgtacccacggcggaaggggaaaaagatcgttatccggccccctacttcggaaagcctagtaacaccattgaagcaatcgagtgttgcgctcagcacagtaacccctgtgtagctttggttgatgagtctgggcactccccactggcgacagcggcccaggctgcgttggcggccaaccgactcgggcaaccgggtcggacgctcgtttgtggacatggtgtgaagagcctactgagctagagggtagtcctccggcccctgaatgcggataatcctaaccccggagcacccacactcaatccagagtgcaggatgtcgtaacgcgtaagtctgggacggaaccgactactttgggtgtccgtgtttcctgttttacttactttggctgcttatggtgacaatctagtgttgttaccatatagctattggattggccatccggtgttttgaattgtgtgtttatactaattcttttacatatcacagacaaccaaat

SEQ ID NO: 22794 - DNA, 549 bp, synthetic construct
  source 1..549: mol_type = other DNA
gtggctcagcgaacaagcacttctgtttccccggtcctagtacctgtgaagctgtacccacggcggaaggggaaaaagatcgttatccggccccctacttcggaaagcctagtaacaccattgaagcaatcgagtgttgcgctcagcacagtaacccctgtgtagctttggttgatgagtctgggcactccccactggcgacagcggcccaggctgcgttggcggccaaccgactcgggcaaccgggtcggacgctcgtttgtggacatggtgtgaagagcctactgagctagagggtagtcctccggcccctgaatgcggataatcctaaccccggagcacccacactcaatccagagtgcaggatgtcgtaacgcgtaagtctgggacggaaccgactactttgggtgtccgtgtttcctgttttacttactttggctgcttatggtgacaatctagtgttgttaccatatagctattggattggccatccggtgttttgaattgtgtgtttatactaattcttttacatatcacagacaaccaaat

SEQ ID NO: 22795 - DNA, 649 bp, synthetic construct
  source 1..649: mol_type = other DNA
ccccgtaacttagaagcaatcaaaccaagttcaatagaagggggtacaaaccagtaccaccacgaacaagcacttctgtttccccggtgaggttgcatagactgtacccacggttgaaagcgactaatccgttatccgctcaagtacttcgggaagcctagtaccaccttcggatcttcgatgcgttgcgctcagcactcaaccccagagtgtagcttaggctgatgagtctggacattcctcactggcgacagtggtccaggctgcgttggcggcctacctgtggcccaaagccacaggacgctagttgtgaacaaggtgtgaagagcctactgagctacttgagattcctccggcccctgaatgcggctaatcccaaccacggagcaggtggtcataaaccaatggctggcctgtcgtaatgcgcaagtctgtggcggaaccgactactttgggtgtccgtgtttccttttatcttttcattggctgcttatggtgacaatcatagattgttatcataaagcaaattggattggccatccggtgaaaatcagagcgattatatatttgtttactggatttacatcactgacaccatactctccaatactcattaggttggttttattaataaggtattattaccata

SEQ ID NO: 22796 - DNA, 599 bp, synthetic construct
  source 1..599: mol_type = other DNA
ccagtaccaccacgaacaagcacttctgtttccccggtgaggttgcatagactgtacccacggttgaaagcgactaatccgttatccgctcaagtacttcgggaagcctagtaccaccttcggatcttcgatgcgttgcgctcagcactcaaccccagagtgtagcttaggctgatgagtctggacattcctcactggcgacagtggtccaggctgcgttggcggcctacctgtggcccaaagccacaggacgctagttgtgaacaaggtgtgaagagcctactgagctacttgagattcctccggcccctgaatgcggctaatcccaaccacggagcaggtggtcataaaccaatggctggcctgtcgtaatgcgcaagtctgtggcggaaccgactactttgggtgtccgtgtttccttttatcttttcattggctgcttatggtgacaatcatagattgttatcataaagcaaattggattggccatccggtgaaaatcagagcgattatatatttgtttactggatttacatcactgacaccatactctccaatactcattaggttggttttattaataaggtattattaccata

SEQ ID NO: 22797 - DNA, 549 bp, synthetic construct
  source 1..549: mol_type = other DNA
actgtacccacggttgaaagcgactaatccgttatccgctcaagtacttcgggaagcctagtaccaccttcggatcttcgatgcgttgcgctcagcactcaaccccagagtgtagcttaggctgatgagtctggacattcctcactggcgacagtggtccaggctgcgttggcggcctacctgtggcccaaagccacaggacgctagttgtgaacaaggtgtgaagagcctactgagctacttgagattcctccggcccctgaatgcggctaatcccaaccacggagcaggtggtcataaaccaatggctggcctgtcgtaatgcgcaagtctgtggcggaaccgactactttgggtgtccgtgtttccttttatcttttcattggctgcttatggtgacaatcatagattgttatcataaagcaaattggattggccatccggtgaaaatcagagcgattatatatttgtttactggatttacatcactgacaccatactctccaatactcattaggttggttttattaataaggtattattaccata

SEQ ID NO: 22798 - DNA, 650 bp, synthetic construct
  source 1..650: mol_type = other DNA
tacactgatatcacggtacctttgtacgcctgttttatctccctacccccatcgtaacttagaagcttaacaatacagatcaatagcctctgcaccaaaccaggtgtggaatgatcaagcatttctgttaccccggacctagtaccaataggctgtgtcaaacggctgaaggggaaaaagttcgttacccggccacctacttcgagaagcctagtagcatcactgaagctgtgaagcgttacgatcagcacaaccccagtgtagttcaggtcgatgagtcactgcattccccacaggcgactgtagcagtggctgcgttggcggcctgcccttggtctctgaccaagggacgctttggagtggatatggtgcgaagagcctattgagctaggtggtagtcctccggcccctgaatgcggctaatcctaaccccggagctggtgcacacaaaccagtgtgtggccagtcgtaatgagcaattctgggatggaaccgactactttgggtgtccgtgtttcctgtttcacttaccttggctgcttatggtgacaattgtatagttgtcatcatatagctattggattggccatccggatattattcttgtgtttatttgtgtaatttgatataatttagaaccctgtataaga

SEQ ID NO: 22799 - DNA, 600 bp, synthetic construct
  source 1..600: mol_type = other DNA
atcgtaacttagaagcttaacaatacagatcaatagcctctgcaccaaaccaggtgtggaatgatcaagcatttctgttaccccggacctagtaccaataggctgtgtcaaacggctgaaggggaaaaagttcgttacccggccacctacttcgagaagcctagtagcatcactgaagctgtgaagcgttacgatcagcacaaccccagtgtagttcaggtcgatgagtcactgcattccccacaggcgactgtagcagtggctgcgttggcggcctgcccttggtctctgaccaagggacgctttggagtggatatggtgcgaagagcctattgagctaggtggtagtcctccggcccctgaatgcggctaatcctaaccccggagctggtgcacacaaaccagtgtgtggccagtcgtaatgagcaattctgggatggaaccgactactttgggtgtccgtgtttcctgtttcacttaccttggctgcttatggtgacaattgtatagttgtcatcatatagctattggattggccatccggatattattcttgtgtttatttgtgtaatttgatataatttagaaccctgtataaga

SEQ ID NO: 22800 - DNA, 550 bp, synthetic construct
  source 1..550: mol_type = other DNA
caggtgtggaatgatcaagcatttctgttaccccggacctagtaccaataggctgtgtcaaacggctgaaggggaaaaagttcgttacccggccacctacttcgagaagcctagtagcatcactgaagctgtgaagcgttacgatcagcacaaccccagtgtagttcaggtcgatgagtcactgcattccccacaggcgactgtagcagtggctgcgttggcggcctgcccttggtctctgaccaagggacgctttggagtggatatggtgcgaagagcctattgagctaggtggtagtcctccggcccctgaatgcggctaatcctaaccccggagctggtgcacacaaaccagtgtgtggccagtcgtaatgagcaattctgggatggaaccgactactttgggtgtccgtgtttcctgtttcacttaccttggctgcttatggtgacaattgtatagttgtcatcatatagctattggattggccatccggatattattcttgtgtttatttgtgtaatttgatataatttagaaccctgtataaga

SEQ ID NO: 22801 - DNA, 500 bp, synthetic construct
  source 1..500: mol_type = other DNA
ggctgtgtcaaacggctgaaggggaaaaagttcgttacccggccacctacttcgagaagcctagtagcatcactgaagctgtgaagcgttacgatcagcacaaccccagtgtagttcaggtcgatgagtcactgcattccccacaggcgactgtagcagtggctgcgttggcggcctgcccttggtctctgaccaagggacgctttggagtggatatggtgcgaagagcctattgagctaggtggtagtcctccggcccctgaatgcggctaatcctaaccccggagctggtgcacacaaaccagtgtgtggccagtcgtaatgagcaattctgggatggaaccgactactttgggtgtccgtgtttcctgtttcacttaccttggctgcttatggtgacaattgtatagttgtcatcatatagctattggattggccatccggatattattcttgtgtttatttgtgtaatttgatataatttagaaccctgtataaga

SEQ ID NO: 22802 - DNA, 652 bp, synthetic construct
  source 1..652: mol_type = other DNA
cttccccaagcagcaacttagaagcttcgcgccaccacgaccagtagtgggcgtgacacaccagtcacgttttggtcaagcacttctgtttccccggactgagtatcaatagactgctcacgcggttgaaggagaaaacgttcgttatccggccaactacttcgagaaacctagtagcatcgtggaagttgcggagtgtttcgctcagcacttcccccgtgtagatcaggtcgatgagtcactgtaaaccccacgggcgaccgtgacagtggctgcgttggcggcctgcccatggggcaacccatgggacgctctaatacagacacggtgtgaagagtctattgagctagttggtagtcctccggcccctgaatgcggctaatcctaactgcggagcgcgcaccctcaacccagggggcagtgcgtcgtaacgggtaactctgcagcggaaccgactactttgggtgtccgtgtttccttttattctctattggctgcttatggtgacaattgaaaagttgttaccatatagctattggattagccatccggtgaccaacagagctattatttacctgtttgttgggtatatccctctcactctcaaggccattcaaactcttaactatatattactccttaactgtaagag

SEQ ID NO: 22803 - DNA, 602 bp, synthetic construct
  source 1..602: mol_type = other DNA
gcgtgacacaccagtcacgttttggtcaagcacttctgtttccccggactgagtatcaatagactgctcacgcggttgaaggagaaaacgttcgttatccggccaactacttcgagaaacctagtagcatcgtggaagttgcggagtgtttcgctcagcacttcccccgtgtagatcaggtcgatgagtcactgtaaaccccacgggcgaccgtgacagtggctgcgttggcggcctgcccatggggcaacccatgggacgctctaatacagacacggtgtgaagagtctattgagctagttggtagtcctccggcccctgaatgcggctaatcctaactgcggagcgcgcaccctcaacccagggggcagtgcgtcgtaacgggtaactctgcagcggaaccgactactttgggtgtccgtgtttccttttattctctattggctgcttatggtgacaattgaaaagttgttaccatatagctattggattagccatccggtgaccaacagagctattatttacctgtttgttgggtatatccctctcactctcaaggccattcaaactcttaactatatattactccttaactgtaagag

SEQ ID NO: 22804 - DNA, 552 bp, synthetic construct
  source 1..552: mol_type = other DNA
gagtatcaatagactgctcacgcggttgaaggagaaaacgttcgttatccggccaactacttcgagaaacctagtagcatcgtggaagttgcggagtgtttcgctcagcacttcccccgtgtagatcaggtcgatgagtcactgtaaaccccacgggcgaccgtgacagtggctgcgttggcggcctgcccatggggcaacccatgggacgctctaatacagacacggtgtgaagagtctattgagctagttggtagtcctccggcccctgaatgcggctaatcctaactgcggagcgcgcaccctcaacccagggggcagtgcgtcgtaacgggtaactctgcagcggaaccgactactttgggtgtccgtgtttccttttattctctattggctgcttatggtgacaattgaaaagttgttaccatatagctattggattagccatccggtgaccaacagagctattatttacctgtttgttgggtatatccctctcactctcaaggccattcaaactcttaactatatattactccttaactgtaagag

SEQ ID NO: 22805 - DNA, 502 bp, synthetic construct
  source 1..502: mol_type = other DNA
ggccaactacttcgagaaacctagtagcatcgtggaagttgcggagtgtttcgctcagcacttcccccgtgtagatcaggtcgatgagtcactgtaaaccccacgggcgaccgtgacagtggctgcgttggcggcctgcccatggggcaacccatgggacgctctaatacagacacggtgtgaagagtctattgagctagttggtagtcctccggcccctgaatgcggctaatcctaactgcggagcgcgcaccctcaacccagggggcagtgcgtcgtaacgggtaactctgcagcggaaccgactactttgggtgtccgtgtttccttttattctctattggctgcttatggtgacaattgaaaagttgttaccatatagctattggattagccatccggtgaccaacagagctattatttacctgtttgttgggtatatccctctcactctcaaggccattcaaactcttaactatatattactccttaactgtaagag

SEQ ID NO: 22806 - DNA, 654 bp, synthetic construct
  source 1..654: mol_type = other DNA
cctcgtaacttagaagcaaacaaaccaagttcaatagaaaggggtacaaaccagtaccaccacgaacaagcacttctgttgccccggtgatgtcgtatagattgtacccacggtcgaaaacgattgatccgttatccgcttttgtacttcgagaagcctagtaccaccttggaatcttcgatgcgttgcgctcggcactcaatcccagagtgtagcttaggtcgatgagtctggacataccccaccggtgacggtggtccaggctgcgttggcggcctacctgtggcccaaagccacaggacgctagttgtgaacaaggtgtgaagagcatattgagctacaaaagagtcctccggcccctgaatgcggctaatcctaaccacggagcaagggtgcacaaaccagtgtataccttgtcgtaacgcgtaagtctgtggcggaaccgactactttgggtgtccgtgtttcctgttattttttatcatggctgcttatggtgacaatcagagattgttatcataaagcaaattggattggccatccggtgagtgttgtgtcaagtatacaactgtttgttggaaccactgtgttagcttcacttctcatttaaccaattaatcaaaaacaatacgaggataaaacaataatactaca

SEQ ID NO: 22807 - DNA, 604 bp, synthetic construct
  source 1..604: mol_type = other DNA
ccagtaccaccacgaacaagcacttctgttgccccggtgatgtcgtatagattgtacccacggtcgaaaacgattgatccgttatccgcttttgtacttcgagaagcctagtaccaccttggaatcttcgatgcgttgcgctcggcactcaatcccagagtgtagcttaggtcgatgagtctggacataccccaccggtgacggtggtccaggctgcgttggcggcctacctgtggcccaaagccacaggacgctagttgtgaacaaggtgtgaagagcatattgagctacaaaagagtcctccggcccctgaatgcggctaatcctaaccacggagcaagggtgcacaaaccagtgtataccttgtcgtaacgcgtaagtctgtggcggaaccgactactttgggtgtccgtgtttcctgttattttttatcatggctgcttatggtgacaatcagagattgttatcataaagcaaattggattggccatccggtgagtgttgtgtcaagtatacaactgtttgttggaaccactgtgttagcttcacttctcatttaaccaattaatcaaaaacaatacgaggataaaacaataatactaca

SEQ ID NO: 22808 - DNA, 554 bp, synthetic construct
  source 1..554: mol_type = other DNA
attgtacccacggtcgaaaacgattgatccgttatccgcttttgtacttcgagaagcctagtaccaccttggaatcttcgatgcgttgcgctcggcactcaatcccagagtgtagcttaggtcgatgagtctggacataccccaccggtgacggtggtccaggctgcgttggcggcctacctgtggcccaaagccacaggacgctagttgtgaacaaggtgtgaagagcatattgagctacaaaagagtcctccggcccctgaatgcggctaatcctaaccacggagcaagggtgcacaaaccagtgtataccttgtcgtaacgcgtaagtctgtggcggaaccgactactttgggtgtccgtgtttcctgttattttttatcatggctgcttatggtgacaatcagagattgttatcataaagcaaattggattggccatccggtgagtgttgtgtcaagtatacaactgtttgttggaaccactgtgttagcttcacttctcatttaaccaattaatcaaaaacaatacgaggataaaacaataatactaca

SEQ ID NO: 22809 - DNA, 504 bp, synthetic construct
  source 1..504: mol_type = other DNA
gagaagcctagtaccaccttggaatcttcgatgcgttgcgctcggcactcaatcccagagtgtagcttaggtcgatgagtctggacataccccaccggtgacggtggtccaggctgcgttggcggcctacctgtggcccaaagccacaggacgctagttgtgaacaaggtgtgaagagcatattgagctacaaaagagtcctccggcccctgaatgcggctaatcctaaccacggagcaagggtgcacaaaccagtgtataccttgtcgtaacgcgtaagtctgtggcggaaccgactactttgggtgtccgtgtttcctgttattttttatcatggctgcttatggtgacaatcagagattgttatcataaagcaaattggattggccatccggtgagtgttgtgtcaagtatacaactgtttgttggaaccactgtgttagcttcacttctcatttaaccaattaatcaaaaacaatacgaggataaaacaataatactaca

SEQ ID NO: 22810 - DNA, 654 bp, synthetic construct
  source 1..654: mol_type = other DNA
tacccctccccaaacgtaacttagaagcacatcacacatggtcaacaggtggcacagtacaccaactgggccgtgaccaagcacttctgttaccccggaccgagtatcaatagactgctcgcgcggttgaaggagaaaacgttcgttacccggccaattacttcgagaaacccagtaccaccgtgaaggttgcgcagcgtttcgctccgcacaaccccagtgtagatcaggtcgatgagccaccgcattccccacgggtgaccgtggcggtggctgcgttggcggcctgcccatggggcaacccatgggacgcttcaatactgacacggtgcgaagagtctattgagctaattggtattcctccggcccctgaatgcggctaatcctaactgcggagcagatacccacaagccagtgggcagtctgtcgtaacgggtaactctgcagcggaaccgactactttgggtgaccgtgtttccttttattcttatattggctgcttatggtgacaattgaaagattgttgccatatagctattggattggccacccagtgacaaacagagctattgtttacctatttgttggctttataccactgaatcttaaagttttagaaactctcaacctgatcttattactcaattcggtaaa

SEQ ID NO: 22811 - DNA, 604 bp, synthetic construct
  source 1..604: mol_type = other DNA
ggcacagtacaccaactgggccgtgaccaagcacttctgttaccccggaccgagtatcaatagactgctcgcgcggttgaaggagaaaacgttcgttacccggccaattacttcgagaaacccagtaccaccgtgaaggttgcgcagcgtttcgctccgcacaaccccagtgtagatcaggtcgatgagccaccgcattccccacgggtgaccgtggcggtggctgcgttggcggcctgcccatggggcaacccatgggacgcttcaatactgacacggtgcgaagagtctattgagctaattggtattcctccggcccctgaatgcggctaatcctaactgcggagcagatacccacaagccagtgggcagtctgtcgtaacgggtaactctgcagcggaaccgactactttgggtgaccgtgtttccttttattcttatattggctgcttatggtgacaattgaaagattgttgccatatagctattggattggccacccagtgacaaacagagctattgtttacctatttgttggctttataccactgaatcttaaagttttagaaactctcaacctgatcttattactcaattcggtaaa

SEQ ID NO: 22812 - DNA, 554 bp, synthetic construct
  source 1..554: mol_type = other DNA
cgagtatcaatagactgctcgcgcggttgaaggagaaaacgttcgttacccggccaattacttcgagaaacccagtaccaccgtgaaggttgcgcagcgtttcgctccgcacaaccccagtgtagatcaggtcgatgagccaccgcattccccacgggtgaccgtggcggtggctgcgttggcggcctgcccatggggcaacccatgggacgcttcaatactgacacggtgcgaagagtctattgagctaattggtattcctccggcccctgaatgcggctaatcctaactgcggagcagatacccacaagccagtgggcagtctgtcgtaacgggtaactctgcagcggaaccgactactttgggtgaccgtgtttccttttattcttatattggctgcttatggtgacaattgaaagattgttgccatatagctattggattggccacccagtgacaaacagagctattgtttacctatttgttggctttataccactgaatcttaaagttttagaaactctcaacctgatcttattactcaattcggtaaa

SEQ ID NO: 22813 - DNA, 504 bp, synthetic construct
  source 1..504: mol_type = other DNA
cggccaattacttcgagaaacccagtaccaccgtgaaggttgcgcagcgtttcgctccgcacaaccccagtgtagatcaggtcgatgagccaccgcattccccacgggtgaccgtggcggtggctgcgttggcggcctgcccatggggcaacccatgggacgcttcaatactgacacggtgcgaagagtctattgagctaattggtattcctccggcccctgaatgcggctaatcctaactgcggagcagatacccacaagccagtgggcagtctgtcgtaacgggtaactctgcagcggaaccgactactttgggtgaccgtgtttccttttattcttatattggctgcttatggtgacaattgaaagattgttgccatatagctattggattggccacccagtgacaaacagagctattgtttacctatttgttggctttataccactgaatcttaaagttttagaaactctcaacctgatcttattactcaattcggtaaa

SEQ ID NO: 22814 - DNA, 657 bp, synthetic construct
  source 1..657: mol_type = other DNA
tcccttcccccgtaacttagaagtaaataacacaagttcaatagaagggggtacaaaccagtaccaccacgaacaagcacttctgttcccccggtgaggtcacatagactgtctccacggttgaaagtgactgatccgttatccgctcttgtacttcgggaagcctagtagcatcttcggatcttcgatgcgttgcgctcagcactcaatcccagagtgtagcttaggtcgatgagtctggacatccctcactggcgacagtggtccaggctgcgttggcggcctacctgtggcccaaagccacaggacgctagttgtgaacaaggtgtgaagagcctactgagctacttgagagtcctccggcccctgaatgcggctaatcccaaccacggagcaaatgactgcaatccagcagttagtttgtcgtaatgcgtaagtctgtggcggaaccgactactttgggtgtccgtgtttccttttatattttatattggctgcttatggtgacaatcactgattgttatcataaagcgacttggattggccatccggtgaaaataagagttattatctacttatttgttggatttactccactatcaacctacacaccagagctcatacgcattgttatagtactaagaaatatacatcaca

SEQ ID NO: 22815 - DNA, 607 bp, synthetic construct
  source 1..607: mol_type = other DNA
gtacaaaccagtaccaccacgaacaagcacttctgttcccccggtgaggtcacatagactgtctccacggttgaaagtgactgatccgttatccgctcttgtacttcgggaagcctagtagcatcttcggatcttcgatgcgttgcgctcagcactcaatcccagagtgtagcttaggtcgatgagtctggacatccctcactggcgacagtggtccaggctgcgttggcggcctacctgtggcccaaagccacaggacgctagttgtgaacaaggtgtgaagagcctactgagctacttgagagtcctccggcccctgaatgcggctaatcccaaccacggagcaaatgactgcaatccagcagttagtttgtcgtaatgcgtaagtctgtggcggaaccgactactttgggtgtccgtgtttccttttatattttatattggctgcttatggtgacaatcactgattgttatcataaagcgacttggattggccatccggtgaaaataagagttattatctacttatttgttggatttactccactatcaacctacacaccagagctcatacgcattgttatagtactaagaaatatacatcaca

SEQ ID NO: 22816 - DNA, 557 bp, synthetic construct
  source 1..557: mol_type = other DNA
cacatagactgtctccacggttgaaagtgactgatccgttatccgctcttgtacttcgggaagcctagtagcatcttcggatcttcgatgcgttgcgctcagcactcaatcccagagtgtagcttaggtcgatgagtctggacatccctcactggcgacagtggtccaggctgcgttggcggcctacctgtggcccaaagccacaggacgctagttgtgaacaaggtgtgaagagcctactgagctacttgagagtcctccggcccctgaatgcggctaatcccaaccacggagcaaatgactgcaatccagcagttagtttgtcgtaatgcgtaagtctgtggcggaaccgactactttgggtgtccgtgtttccttttatattttatattggctgcttatggtgacaatcactgattgttatcataaagcgacttggattggccatccggtgaaaataagagttattatctacttatttgttggatttactccactatcaacctacacaccagagctcatacgcattgttatagtactaagaaatatacatcaca

SEQ ID NO: 22817 - DNA, 507 bp, synthetic construct
  source 1..507: mol_type = other DNA
gtacttcgggaagcctagtagcatcttcggatcttcgatgcgttgcgctcagcactcaatcccagagtgtagcttaggtcgatgagtctggacatccctcactggcgacagtggtccaggctgcgttggcggcctacctgtggcccaaagccacaggacgctagttgtgaacaaggtgtgaagagcctactgagctacttgagagtcctccggcccctgaatgcggctaatcccaaccacggagcaaatgactgcaatccagcagttagtttgtcgtaatgcgtaagtctgtggcggaaccgactactttgggtgtccgtgtttccttttatattttatattggctgcttatggtgacaatcactgattgttatcataaagcgacttggattggccatccggtgaaaataagagttattatctacttatttgttggatttactccactatcaacctacacaccagagctcatacgcattgttatagtactaagaaatatacatcaca

SEQ ID NO: 22818 - DNA, 657 bp, synthetic construct
  source 1..657: mol_type = other DNA
actctggtatcaaggtacctttgtacgcctgttttatatcccctcccccaagtaactttagaagcaattcaaacagttcaatagagggggtacaaaccagtaccaccacgaacaagcacttctgtttccccggtgaggctgtatagactgttcccacggttgaaaatggctgatccgttatccgctcatgtacttcgagaagcctagtatctccttggaatcttcgatgcgttgcgctcagcactctaccccgagtgtagcttaggctgatgagtctgggcataccccaccggtgacggtggcccaggctgcgttggcggcctacccatggctaacgccatgggacgctagttgtgaacaaggtgtgaagagcctattgagctacttgagagtcctccggcccctgaatgcggctaatcccaaccacggagcaagtgcctgcataccagcaggtagcttgtcgtaacgcgcaagtctgtggcggaaccgactactttgggtgtccgtgtttccttttattcttatcatggctgcttatggtgacaatctaagattgttatcatatagcttttggattggccatccggtgattgtttgatatttgaacacttgtttaccttatcttattacacaccaatttacatacctaacttcatt

SEQ ID NO: 22819 - DNA, 607 bp, synthetic construct
  source 1..607: mol_type = other DNA
agtaactttagaagcaattcaaacagttcaatagagggggtacaaaccagtaccaccacgaacaagcacttctgtttccccggtgaggctgtatagactgttcccacggttgaaaatggctgatccgttatccgctcatgtacttcgagaagcctagtatctccttggaatcttcgatgcgttgcgctcagcactctaccccgagtgtagcttaggctgatgagtctgggcataccccaccggtgacggtggcccaggctgcgttggcggcctacccatggctaacgccatgggacgctagttgtgaacaaggtgtgaagagcctattgagctacttgagagtcctccggcccctgaatgcggctaatcccaaccacggagcaagtgcctgcataccagcaggtagcttgtcgtaacgcgcaagtctgtggcggaaccgactactttgggtgtccgtgtttccttttattcttatcatggctgcttatggtgacaatctaagattgttatcatatagcttttggattggccatccggtgattgtttgatatttgaacacttgtttaccttatcttattacacaccaatttacatacctaacttcatt

SEQ ID NO: 22820 - DNA, 557 bp, synthetic construct
  source 1..557: mol_type = other DNA
taccaccacgaacaagcacttctgtttccccggtgaggctgtatagactgttcccacggttgaaaatggctgatccgttatccgctcatgtacttcgagaagcctagtatctccttggaatcttcgatgcgttgcgctcagcactctaccccgagtgtagcttaggctgatgagtctgggcataccccaccggtgacggtggcccaggctgcgttggcggcctacccatggctaacgccatgggacgctagttgtgaacaaggtgtgaagagcctattgagctacttgagagtcctccggcccctgaatgcggctaatcccaaccacggagcaagtgcctgcataccagcaggtagcttgtcgtaacgcgcaagtctgtggcggaaccgactactttgggtgtccgtgtttccttttattcttatcatggctgcttatggtgacaatctaagattgttatcatatagcttttggattggccatccggtgattgtttgatatttgaacacttgtttaccttatcttattacacaccaatttacatacctaacttcatt

SEQ ID NO: 22821 - DNA, 507 bp, synthetic construct
  source 1..507: mol_type = other DNA
ttcccacggttgaaaatggctgatccgttatccgctcatgtacttcgagaagcctagtatctccttggaatcttcgatgcgttgcgctcagcactctaccccgagtgtagcttaggctgatgagtctgggcataccccaccggtgacggtggcccaggctgcgttggcggcctacccatggctaacgccatgggacgctagttgtgaacaaggtgtgaagagcctattgagctacttgagagtcctccggcccctgaatgcggctaatcccaaccacggagcaagtgcctgcataccagcaggtagcttgtcgtaacgcgcaagtctgtggcggaaccgactactttgggtgtccgtgtttccttttattcttatcatggctgcttatggtgacaatctaagattgttatcatatagcttttggattggccatccggtgattgtttgatatttgaacacttgtttaccttatcttattacacaccaatttacatacctaacttcatt

SEQ ID NO: 22822 - DNA, 658 bp, synthetic construct
  source 1..658: mol_type = other DNA
tatctaccctccccccaacgcaacttagaagcataacttaaatggtcaacagataactcagtatgccaactgagccctgaccaagcacttctgttatcccggactgagtaccaataggctgctcacgcggccgaaggggaaaccgttcgttacccggccaattacttcgagaaacctagtaccaccatgaaagttgcgcagtgtttcgctccgcacaaccccagtgtagatcaggtcgatgagtcaccgcaaaccccacgggcgaccgtggcggtggctgcgttggcggcctgcccatggggcaacccatgggacgcttcaatactgacatggtgcgaagagtctattgagctaattggtagtcctccggcccctgaatgcggctaatcccaactgcggagcagatacccacacaccagcgggcagtctgtcgtaatgggcaactctgcagcggaaccgactactttgggtgtccgtgtttccttttattctcatactggctgcttatggtgacaattgagagattgttaccatatagctattggattggccatccggttacaaacagagcaattatttacttatttgttggttttgtaccactgaactacagagtcctgaaaaccctcaatctcattataacactcaatacgttaaa

SEQ ID NO: 22823 - DNA, 608 bp, synthetic construct
  source 1..608: mol_type = other DNA
agataactcagtatgccaactgagccctgaccaagcacttctgttatcccggactgagtaccaataggctgctcacgcggccgaaggggaaaccgttcgttacccggccaattacttcgagaaacctagtaccaccatgaaagttgcgcagtgtttcgctccgcacaaccccagtgtagatcaggtcgatgagtcaccgcaaaccccacgggcgaccgtggcggtggctgcgttggcggcctgcccatggggcaacccatgggacgcttcaatactgacatggtgcgaagagtctattgagctaattggtagtcctccggcccctgaatgcggctaatcccaactgcggagcagatacccacacaccagcgggcagtctgtcgtaatgggcaactctgcagcggaaccgactactttgggtgtccgtgtttccttttattctcatactggctgcttatggtgacaattgagagattgttaccatatagctattggattggccatccggttacaaacagagcaattatttacttatttgttggttttgtaccactgaactacagagtcctgaaaaccctcaatctcattataacactcaatacgttaaa

SEQ ID NO: 22824 - DNA, 558 bp, synthetic construct
  source 1..558: mol_type = other DNA
ggactgagtaccaataggctgctcacgcggccgaaggggaaaccgttcgttacccggccaattacttcgagaaacctagtaccaccatgaaagttgcgcagtgtttcgctccgcacaaccccagtgtagatcaggtcgatgagtcaccgcaaaccccacgggcgaccgtggcggtggctgcgttggcggcctgcccatggggcaacccatgggacgcttcaatactgacatggtgcgaagagtctattgagctaattggtagtcctccggcccctgaatgcggctaatcccaactgcggagcagatacccacacaccagcgggcagtctgtcgtaatgggcaactctgcagcggaaccgactactttgggtgtccgtgtttccttttattctcatactggctgcttatggtgacaattgagagattgttaccatatagctattggattggccatccggttacaaacagagcaattatttacttatttgttggttttgtaccactgaactacagagtcctgaaaaccctcaatctcattataacactcaatacgttaaa

SEQ ID NO: 22825 - DNA, 508 bp, synthetic construct
  source 1..508: mol_type = other DNA
tacccggccaattacttcgagaaacctagtaccaccatgaaagttgcgcagtgtttcgctccgcacaaccccagtgtagatcaggtcgatgagtcaccgcaaaccccacgggcgaccgtggcggtggctgcgttggcggcctgcccatggggcaacccatgggacgcttcaatactgacatggtgcgaagagtctattgagctaattggtagtcctccggcccctgaatgcggctaatcccaactgcggagcagatacccacacaccagcgggcagtctgtcgtaatgggcaactctgcagcggaaccgactactttgggtgtccgtgtttccttttattctcatactggctgcttatggtgacaattgagagattgttaccatatagctattggattggccatccggttacaaacagagcaattatttacttatttgttggttttgtaccactgaactacagagtcctgaaaaccctcaatctcattataacactcaatacgttaaa

SEQ ID NO: 22826 - DNA, 608 bp, synthetic construct
  source 1..608: mol_type = other DNA
aggaaacccagtgcaccaactggggcgcgaccaagcactcctgtaaccccggactgagtatcaataagctgcttgcgtggctgaaggagaaaacgttcgttacccggccaattacttcgagaaacctagtaccaccatgaaagttgcgcagcgtttcgctccgcacaaccccagtgtagatcaggccgatgagtcaccgcattccccacgggcgaccgtggcggtggctgcgttggcggcctgcccatgggataacccatgggacgcttcaatactgacatggtgcgaagagtctattgagctaattggtagtcctccggcccctgaatgcggctaatcctaactgcggagcagacacccacaagccagtgggcagtctgtcgtaacgggtaactctgcagcggaaccgactactttgggtgtccgtgtttccttttatttctatactggctgcttatggtgacaattgaaaggttgttaccatatagctattggattggccatccggtgtctaacagagcaatcatttatttatttgttggattcgtacccctaaatcctaaagtctttaacactctcaacttcatattacgattaaatacagcaag

SEQ ID NO: 22827 - DNA, 558 bp, synthetic construct
  source 1..558: mol_type = other DNA
ggactgagtatcaataagctgcttgcgtggctgaaggagaaaacgttcgttacccggccaattacttcgagaaacctagtaccaccatgaaagttgcgcagcgtttcgctccgcacaaccccagtgtagatcaggccgatgagtcaccgcattccccacgggcgaccgtggcggtggctgcgttggcggcctgcccatgggataacccatgggacgcttcaatactgacatggtgcgaagagtctattgagctaattggtagtcctccggcccctgaatgcggctaatcctaactgcggagcagacacccacaagccagtgggcagtctgtcgtaacgggtaactctgcagcggaaccgactactttgggtgtccgtgtttccttttatttctatactggctgcttatggtgacaattgaaaggttgttaccatatagctattggattggccatccggtgtctaacagagcaatcatttatttatttgttggattcgtacccctaaatcctaaagtctttaacactctcaacttcatattacgattaaatacagcaag

SEQ ID NO: 22828 - DNA, 508 bp, synthetic construct
  source 1..508: mol_type = other DNA
tacccggccaattacttcgagaaacctagtaccaccatgaaagttgcgcagcgtttcgctccgcacaaccccagtgtagatcaggccgatgagtcaccgcattccccacgggcgaccgtggcggtggctgcgttggcggcctgcccatgggataacccatgggacgcttcaatactgacatggtgcgaagagtctattgagctaattggtagtcctccggcccctgaatgcggctaatcctaactgcggagcagacacccacaagccagtgggcagtctgtcgtaacgggtaactctgcagcggaaccgactactttgggtgtccgtgtttccttttatttctatactggctgcttatggtgacaattgaaaggttgttaccatatagctattggattggccatccggtgtctaacagagcaatcatttatttatttgttggattcgtacccctaaatcctaaagtctttaacactctcaacttcatattacgattaaatacagcaag

SEQ ID NO: 22829 - DNA, 659 bp, synthetic construct
  source 1..659: mol_type = other DNA
tttatttacccccccccaacgtaacttagaagcacaacctaatcggtcaatagataactcagtacaccaactgagtccagaccaagcacttctgttaccccggaccgagtatcaataagctgctcgcgcggctgaaggagaaaaggttcgttacccgaccaattacttcgagaaacccagtaccaccatggaagttgcgcagtgtttcgctccgcacaaccccagtgtagatcaggtcgatgagtcaccgcgttccccacgggcgaccgtggtggtggctgcgttggcggcctgcccatgaggtaacccatgggacgcttcaatactgacatggtgcgaagagtctattgagctaattggtagtcctccggcccctgaatgcggctaatcctaactgcggagcagatacctacacgccagtaggcagtctgtcgtaatgggcaactctgcagcggaaccgactactttgggtgtccgtgtttccttttattcttacattggctgcttatggtgacaattgagagattgttaccatatagctattggattggccatccagtgacaaacagagcgatcatctacttgtttgttggttttataccactaaattacaaagtcttaaacacactcaatttcattctgtcacttaatacattgag

SEQ ID NO: 22830 - DNA, 609 bp, synthetic construct
  source 1..609: mol_type = other DNA
tagataactcagtacaccaactgagtccagaccaagcacttctgttaccccggaccgagtatcaataagctgctcgcgcggctgaaggagaaaaggttcgttacccgaccaattacttcgagaaacccagtaccaccatggaagttgcgcagtgtttcgctccgcacaaccccagtgtagatcaggtcgatgagtcaccgcgttccccacgggcgaccgtggtggtggctgcgttggcggcctgcccatgaggtaacccatgggacgcttcaatactgacatggtgcgaagagtctattgagctaattggtagtcctccggcccctgaatgcggctaatcctaactgcggagcagatacctacacgccagtaggcagtctgtcgtaatgggcaactctgcagcggaaccgactactttgggtgtccgtgtttccttttattcttacattggctgcttatggtgacaattgagagattgttaccatatagctattggattggccatccagtgacaaacagagcgatcatctacttgtttgttggttttataccactaaattacaaagtcttaaacacactcaatttcattctgtcacttaatacattgag

SEQ ID NO: 22831 - DNA, 559 bp, synthetic construct
  source 1..559: mol_type = other DNA
cggaccgagtatcaataagctgctcgcgcggctgaaggagaaaaggttcgttacccgaccaattacttcgagaaacccagtaccaccatggaagttgcgcagtgtttcgctccgcacaaccccagtgtagatcaggtcgatgagtcaccgcgttccccacgggcgaccgtggtggtggctgcgttggcggcctgcccatgaggtaacccatgggacgcttcaatactgacatggtgcgaagagtctattgagctaattggtagtcctccggcccctgaatgcggctaatcctaactgcggagcagatacctacacgccagtaggcagtctgtcgtaatgggcaactctgcagcggaaccgactactttgggtgtccgtgtttccttttattcttacattggctgcttatggtgacaattgagagattgttaccatatagctattggattggccatccagtgacaaacagagcgatcatctacttgtttgttggttttataccactaaattacaaagtcttaaacacactcaatttcattctgtcacttaatacattgag

SEQ ID NO: 22832 - DNA, 509 bp, synthetic construct
  source 1..509: mol_type = other DNA
ttacccgaccaattacttcgagaaacccagtaccaccatggaagttgcgcagtgtttcgctccgcacaaccccagtgtagatcaggtcgatgagtcaccgcgttccccacgggcgaccgtggtggtggctgcgttggcggcctgcccatgaggtaacccatgggacgcttcaatactgacatggtgcgaagagtctattgagctaattggtagtcctccggcccctgaatgcggctaatcctaactgcggagcagatacctacacgccagtaggcagtctgtcgtaatgggcaactctgcagcggaaccgactactttgggtgtccgtgtttccttttattcttacattggctgcttatggtgacaattgagagattgttaccatatagctattggattggccatccagtgacaaacagagcgatcatctacttgtttgttggttttataccactaaattacaaagtcttaaacacactcaatttcattctgtcacttaatacattgag

SEQ ID NO: 22833 - DNA, 660 bp, synthetic construct
  source 1..660: mol_type = other DNA
gtactctggtattgcggtacctttgtacgcctgttttatacccccttccccagtaactttagaagcaattcattcagttcaatagagggggtacaaaccagtaccaccacgaacaagcacttctgtttccccggtgaagccgtatagactgtacccacggttgaaaatggcagatccgttatccgctcatgtacttcgagaagcctagtatcatcttggaatcttcgatgcgttgcgctcagcactctaccccgagtgtagcttaggctgatgagtctgggcataccccaccggcgacggtggcccaggctgcgttggcggcctacccatggctaacgccatgggacgctagatgtgaacaaggtgtgaagagcctattgagctacttgagagtcctccggcccctgaatgcggctaatcctaaccacggagcaagcgcttacaaaccagtaagtagcttgtcgtaacgcgcaagtctgtggcggaaccgactactttgggtgtccgtgtttccctttatttttattgtggctgcttatggtgacaatctaagattgttatcatatagctattggattggccatccggtgatttgtcgagtttcaaacgcttgtttatttctccacaacacttgcctactcaatacatttacaaaccata

SEQ ID NO: 22834 - DNA, 610 bp, synthetic construct
  source 1..610: mol_type = other DNA
cagtaactttagaagcaattcattcagttcaatagagggggtacaaaccagtaccaccacgaacaagcacttctgtttccccggtgaagccgtatagactgtacccacggttgaaaatggcagatccgttatccgctcatgtacttcgagaagcctagtatcatcttggaatcttcgatgcgttgcgctcagcactctaccccgagtgtagcttaggctgatgagtctgggcataccccaccggcgacggtggcccaggctgcgttggcggcctacccatggctaacgccatgggacgctagatgtgaacaaggtgtgaagagcctattgagctacttgagagtcctccggcccctgaatgcggctaatcctaaccacggagcaagcgcttacaaaccagtaagtagcttgtcgtaacgcgcaagtctgtggcggaaccgactactttgggtgtccgtgtttccctttatttttattgtggctgcttatggtgacaatctaagattgttatcatatagctattggattggccatccggtgatttgtcgagtttcaaacgcttgtttatttctccacaacacttgcctactcaatacatttacaaaccata

SEQ ID NO: 22835 - DNA, 560 bp, synthetic construct
  source 1..560: mol_type = other DNA
gtaccaccacgaacaagcacttctgtttccccggtgaagccgtatagactgtacccacggttgaaaatggcagatccgttatccgctcatgtacttcgagaagcctagtatcatcttggaatcttcgatgcgttgcgctcagcactctaccccgagtgtagcttaggctgatgagtctgggcataccccaccggcgacggtggcccaggctgcgttggcggcctacccatggctaacgccatgggacgctagatgtgaacaaggtgtgaagagcctattgagctacttgagagtcctccggcccctgaatgcggctaatcctaaccacggagcaagcgcttacaaaccagtaagtagcttgtcgtaacgcgcaagtctgtggcggaaccgactactttgggtgtccgtgtttccctttatttttattgtggctgcttatggtgacaatctaagattgttatcatatagctattggattggccatccggtgatttgtcgagtttcaaacgcttgtttatttctccacaacacttgcctactcaatacatttacaaaccata

SEQ ID NO: 22836 - DNA, 510 bp, synthetic construct
  source 1..510: mol_type = other DNA
gtacccacggttgaaaatggcagatccgttatccgctcatgtacttcgagaagcctagtatcatcttggaatcttcgatgcgttgcgctcagcactctaccccgagtgtagcttaggctgatgagtctgggcataccccaccggcgacggtggcccaggctgcgttggcggcctacccatggctaacgccatgggacgctagatgtgaacaaggtgtgaagagcctattgagctacttgagagtcctccggcccctgaatgcggctaatcctaaccacggagcaagcgcttacaaaccagtaagtagcttgtcgtaacgcgcaagtctgtggcggaaccgactactttgggtgtccgtgtttccctttatttttattgtggctgcttatggtgacaatctaagattgttatcatatagctattggattggccatccggtgatttgtcgagtttcaaacgcttgtttatttctccacaacacttgcctactcaatacatttacaaaccata

SEQ ID NO: 22837 - DNA, 660 bp, synthetic construct
  source 1..660: mol_type = other DNA
tatttctgggtcttcggtacctttgtacgcctgttttatctccctccccaatgtaacttagaagctttcaaatcaaagctcaataggtggagcgcaaaccagcgctttcgtgagcaagcactcctgtttccccggtgcggttgtatagactgttcccacggttgaaaacaacctatccgttatccgctatagtacttcgagaaacctagtatcacctttggattgttgatgcgttgcgctcaacacactaacccgtgtgtagcttgggtcgatgagtctggacataccccactggtaacagtggtccaggctgcgttggcggcctactcatggtgaaaaccatgagacgctagacatgaacaaggtgtgaagagtctattgagctactatagagtcctccggcccctgaatgcggctaatcttaaccatggagcaagtgctcacaaaccagtgagttgcttgtcgtaatgcgcaagtccgtggcggaaccgactactttgggtgtccgtgtttcactttttacttttatgactgcttatggtgacaatttaatattgttaccattcagctagtcgaaataatcgcataaaactttaaatcctatctaacaattcacatttggatagtttcattttgaggactttaaacctacttacaaag

SEQ ID NO: 22838 - DNA, 610 bp, synthetic construct
  source 1..610: mol_type = other DNA
atgtaacttagaagctttcaaatcaaagctcaataggtggagcgcaaaccagcgctttcgtgagcaagcactcctgtttccccggtgcggttgtatagactgttcccacggttgaaaacaacctatccgttatccgctatagtacttcgagaaacctagtatcacctttggattgttgatgcgttgcgctcaacacactaacccgtgtgtagcttgggtcgatgagtctggacataccccactggtaacagtggtccaggctgcgttggcggcctactcatggtgaaaaccatgagacgctagacatgaacaaggtgtgaagagtctattgagctactatagagtcctccggcccctgaatgcggctaatcttaaccatggagcaagtgctcacaaaccagtgagttgcttgtcgtaatgcgcaagtccgtggcggaaccgactactttgggtgtccgtgtttcactttttacttttatgactgcttatggtgacaatttaatattgttaccattcagctagtcgaaataatcgcataaaactttaaatcctatctaacaattcacatttggatagtttcattttgaggactttaaacctacttacaaag

SEQ ID NO: 22839 - DNA, 560 bp, synthetic construct
  source 1..560: mol_type = other DNA
agcgctttcgtgagcaagcactcctgtttccccggtgcggttgtatagactgttcccacggttgaaaacaacctatccgttatccgctatagtacttcgagaaacctagtatcacctttggattgttgatgcgttgcgctcaacacactaacccgtgtgtagcttgggtcgatgagtctggacataccccactggtaacagtggtccaggctgcgttggcggcctactcatggtgaaaaccatgagacgctagacatgaacaaggtgtgaagagtctattgagctactatagagtcctccggcccctgaatgcggctaatcttaaccatggagcaagtgctcacaaaccagtgagttgcttgtcgtaatgcgcaagtccgtggcggaaccgactactttgggtgtccgtgtttcactttttacttttatgactgcttatggtgacaatttaatattgttaccattcagctagtcgaaataatcgcataaaactttaaatcctatctaacaattcacatttggatagtttcattttgaggactttaaacctacttacaaag

SEQ ID NO: 22840 - DNA, 510 bp, synthetic construct
  source 1..510: mol_type = other DNA
tgttcccacggttgaaaacaacctatccgttatccgctatagtacttcgagaaacctagtatcacctttggattgttgatgcgttgcgctcaacacactaacccgtgtgtagcttgggtcgatgagtctggacataccccactggtaacagtggtccaggctgcgttggcggcctactcatggtgaaaaccatgagacgctagacatgaacaaggtgtgaagagtctattgagctactatagagtcctccggcccctgaatgcggctaatcttaaccatggagcaagtgctcacaaaccagtgagttgcttgtcgtaatgcgcaagtccgtggcggaaccgactactttgggtgtccgtgtttcactttttacttttatgactgcttatggtgacaatttaatattgttaccattcagctagtcgaaataatcgcataaaactttaaatcctatctaacaattcacatttggatagtttcattttgaggactttaaacctacttacaaag

SEQ ID NO: 22841 - DNA, 661 bp, synthetic construct
  source 1..661: mol_type = other DNA
gtactctggtatcgaggtacctttgtacgcctgttttacaccccttcccctgtgcaactttagaagcaaatcacaaagttcaatagagggggtgcaaaccagcaccaccacgaacaagcacttctgtttccccggtgatgctgtatagactgttcccacggtcaaaaatggcagatccgttatccgcttgagtacttcgagaagcctagtaccaccttggaatcttcgatgtgttgcgctcagcactctaccccgagtgtagcttaggctgatgagtctgggcataccccaccggcgacggtggcccaggctgcgttggcggcctacccatggctaacgccatgggacgctagttgtgaacaaggtgtgaagagcctattgagctactcaagagtcctccggcccctgaatgcggctaatcctaaccacggagcaagtactcacaaaccagtgagcggcttgtcgtaacgcgtaagtctgtggcggaaccgactactttgggtgtccgtgtttccttttatttttattgtggctgcttatggtgacaatctaagattgttatcatatagcttttggattggccatccggtgattgttgagattatattactcatttgttttactacggttcttgcccaattgttacatttgcactaacata

SEQ ID NO: 22842 - DNA, 611 bp, synthetic construct
  source 1..611: mol_type = other DNA
tgtgcaactttagaagcaaatcacaaagttcaatagagggggtgcaaaccagcaccaccacgaacaagcacttctgtttccccggtgatgctgtatagactgttcccacggtcaaaaatggcagatccgttatccgcttgagtacttcgagaagcctagtaccaccttggaatcttcgatgtgttgcgctcagcactctaccccgagtgtagcttaggctgatgagtctgggcataccccaccggcgacggtggcccaggctgcgttggcggcctacccatggctaacgccatgggacgctagttgtgaacaaggtgtgaagagcctattgagctactcaagagtcctccggcccctgaatgcggctaatcctaaccacggagcaagtactcacaaaccagtgagcggcttgtcgtaacgcgtaagtctgtggcggaaccgactactttgggtgtccgtgtttccttttatttttattgtggctgcttatggtgacaatctaagattgttatcatatagcttttggattggccatccggtgattgttgagattatattactcatttgttttactacggttcttgcccaattgttacatttgcactaacata

SEQ ID NO: 22843 - DNA, 561 bp, synthetic construct
  source 1..561: mol_type = other DNA
agcaccaccacgaacaagcacttctgtttccccggtgatgctgtatagactgttcccacggtcaaaaatggcagatccgttatccgcttgagtacttcgagaagcctagtaccaccttggaatcttcgatgtgttgcgctcagcactctaccccgagtgtagcttaggctgatgagtctgggcataccccaccggcgacggtggcccaggctgcgttggcggcctacccatggctaacgccatgggacgctagttgtgaacaaggtgtgaagagcctattgagctactcaagagtcctccggcccctgaatgcggctaatcctaaccacggagcaagtactcacaaaccagtgagcggcttgtcgtaacgcgtaagtctgtggcggaaccgactactttgggtgtccgtgtttccttttatttttattgtggctgcttatggtgacaatctaagattgttatcatatagcttttggattggccatccggtgattgttgagattatattactcatttgttttactacggttcttgcccaattgttacatttgcactaacata

SEQ ID NO: 22844 - DNA, 511 bp, synthetic construct
  source 1..511: mol_type = other DNA
tgttcccacggtcaaaaatggcagatccgttatccgcttgagtacttcgagaagcctagtaccaccttggaatcttcgatgtgttgcgctcagcactctaccccgagtgtagcttaggctgatgagtctgggcataccccaccggcgacggtggcccaggctgcgttggcggcctacccatggctaacgccatgggacgctagttgtgaacaaggtgtgaagagcctattgagctactcaagagtcctccggcccctgaatgcggctaatcctaaccacggagcaagtactcacaaaccagtgagcggcttgtcgtaacgcgtaagtctgtggcggaaccgactactttgggtgtccgtgtttccttttatttttattgtggctgcttatggtgacaatctaagattgttatcatatagcttttggattggccatccggtgattgttgagattatattactcatttgttttactacggttcttgcccaattgttacatttgcactaacata

SEQ ID NO: 22845 - DNA, 661 bp, synthetic construct
  source 1..661: mol_type = other DNA
gtacactggtatcacggtacctttgtacgcctgttttatatcccctcccccatgcaactttagaagtaattcaaatagttcaatagagggggtacaaaccagtaccaccacgaacaagcacttctgtttccccggtgaggctatatagactgttcccacggtcgaaggtggctgatccgttatccgcttgagtacttcgagaagcctagtaccacctttggatcttcgatgcgttgcgctcagcactctaccccgagtgtagcttaggctgatgagtctgggcataccccaccggcgacggtggcccaggctgcgttggcggcctacccgtggctaacgccatgggacgctagttgtgaacaaggtgtgaagagcctattgagctacttaagagtcctccggcccctgaatgcggctaatcccaaccacggagcaagtgctcacaaaccagtgggtggcttgtcgtaacgcgcaagtctgtggcggaaccgactactttgggtgtccgtgtttccttttatttttatcatggctgcttatggtgacaatctaagattgttgtcatatagcgtttggattggccatccggtgacttcgaaagcgatatatttgactcattgtcttactgaatttacctatttattacacttgtataacaata

SEQ ID NO: 22846 - DNA, 611 bp, synthetic construct
  source 1..611: mol_type = other DNA
catgcaactttagaagtaattcaaatagttcaatagagggggtacaaaccagtaccaccacgaacaagcacttctgtttccccggtgaggctatatagactgttcccacggtcgaaggtggctgatccgttatccgcttgagtacttcgagaagcctagtaccacctttggatcttcgatgcgttgcgctcagcactctaccccgagtgtagcttaggctgatgagtctgggcataccccaccggcgacggtggcccaggctgcgttggcggcctacccgtggctaacgccatgggacgctagttgtgaacaaggtgtgaagagcctattgagctacttaagagtcctccggcccctgaatgcggctaatcccaaccacggagcaagtgctcacaaaccagtgggtggcttgtcgtaacgcgcaagtctgtggcggaaccgactactttgggtgtccgtgtttccttttatttttatcatggctgcttatggtgacaatctaagattgttgtcatatagcgtttggattggccatccggtgacttcgaaagcgatatatttgactcattgtcttactgaatttacctatttattacacttgtataacaata

SEQ ID NO: 22847 - DNA, 561 bp, synthetic construct
  source 1..561: mol_type = other DNA
agtaccaccacgaacaagcacttctgtttccccggtgaggctatatagactgttcccacggtcgaaggtggctgatccgttatccgcttgagtacttcgagaagcctagtaccacctttggatcttcgatgcgttgcgctcagcactctaccccgagtgtagcttaggctgatgagtctgggcataccccaccggcgacggtggcccaggctgcgttggcggcctacccgtggctaacgccatgggacgctagttgtgaacaaggtgtgaagagcctattgagctacttaagagtcctccggcccctgaatgcggctaatcccaaccacggagcaagtgctcacaaaccagtgggtggcttgtcgtaacgcgcaagtctgtggcggaaccgactactttgggtgtccgtgtttccttttatttttatcatggctgcttatggtgacaatctaagattgttgtcatatagcgtttggattggccatccggtgacttcgaaagcgatatatttgactcattgtcttactgaatttacctatttattacacttgtataacaata

SEQ ID NO: 22848 - DNA, 511 bp, synthetic construct
  source 1..511: mol_type = other DNA
tgttcccacggtcgaaggtggctgatccgttatccgcttgagtacttcgagaagcctagtaccacctttggatcttcgatgcgttgcgctcagcactctaccccgagtgtagcttaggctgatgagtctgggcataccccaccggcgacggtggcccaggctgcgttggcggcctacccgtggctaacgccatgggacgctagttgtgaacaaggtgtgaagagcctattgagctacttaagagtcctccggcccctgaatgcggctaatcccaaccacggagcaagtgctcacaaaccagtgggtggcttgtcgtaacgcgcaagtctgtggcggaaccgactactttgggtgtccgtgtttccttttatttttatcatggctgcttatggtgacaatctaagattgttgtcatatagcgtttggattggccatccggtgacttcgaaagcgatatatttgactcattgtcttactgaatttacctatttattacacttgtataacaata

SEQ ID NO: 22849 - DNA, 661 bp, synthetic construct
  source 1..661: mol_type = other DNA
gtactctggtattgcggtacctttgtacgcctgttttatatcccctccccaagtaactttagaagcaattcacaaagttcaatagagggggtacaaaccagtaccaccatgaacaagcacttctgtttccccggtgaagctgtatagactgttcccacggtcgaaaatggcagatccgttatccgctcacgtacttcgagaagcctagtatcatcttggaatcttcgacgcgttgcgctcagcactctaccccgagtgtagcttaggccgatgagtctgggcataccccaccggcgacggtggcccaggctgcgttggcggcctacccatggctaatgtcatgggacgctagttgtgaacaaggtgtgaagagcctattgagctacttgagagtcctccggcccctgaatgcggctaatcctaaccatggagcaagtgcccacaagccagtgggtggcttgtcgtaatgcgcaagtctatggcggaaccgactactttgggtgtccgtgtttccttttattcttattatggctgcttatggtgacaacctaagattgttgtcatatagcttttggattggccatccggtgatctttgagattaatataccttccttattacttcatagtactcatttattcattacactactgtagttaca

SEQ ID NO: 22850 - DNA, 611 bp, synthetic construct
  source 1..611: mol_type = other DNA
aagtaactttagaagcaattcacaaagttcaatagagggggtacaaaccagtaccaccatgaacaagcacttctgtttccccggtgaagctgtatagactgttcccacggtcgaaaatggcagatccgttatccgctcacgtacttcgagaagcctagtatcatcttggaatcttcgacgcgttgcgctcagcactctaccccgagtgtagcttaggccgatgagtctgggcataccccaccggcgacggtggcccaggctgcgttggcggcctacccatggctaatgtcatgggacgctagttgtgaacaaggtgtgaagagcctattgagctacttgagagtcctccggcccctgaatgcggctaatcctaaccatggagcaagtgcccacaagccagtgggtggcttgtcgtaatgcgcaagtctatggcggaaccgactactttgggtgtccgtgtttccttttattcttattatggctgcttatggtgacaacctaagattgttgtcatatagcttttggattggccatccggtgatctttgagattaatataccttccttattacttcatagtactcatttattcattacactactgtagttaca

SEQ ID NO: 22851 - DNA, 561 bp, synthetic construct
  source 1..561: mol_type = other DNA
gtaccaccatgaacaagcacttctgtttccccggtgaagctgtatagactgttcccacggtcgaaaatggcagatccgttatccgctcacgtacttcgagaagcctagtatcatcttggaatcttcgacgcgttgcgctcagcactctaccccgagtgtagcttaggccgatgagtctgggcataccccaccggcgacggtggcccaggctgcgttggcggcctacccatggctaatgtcatgggacgctagttgtgaacaaggtgtgaagagcctattgagctacttgagagtcctccggcccctgaatgcggctaatcctaaccatggagcaagtgcccacaagccagtgggtggcttgtcgtaatgcgcaagtctatggcggaaccgactactttgggtgtccgtgtttccttttattcttattatggctgcttatggtgacaacctaagattgttgtcatatagcttttggattggccatccggtgatctttgagattaatataccttccttattacttcatagtactcatttattcattacactactgtagttaca

SEQ ID NO: 22852 - DNA, 511 bp, synthetic construct
  source 1..511: mol_type = other DNA
gttcccacggtcgaaaatggcagatccgttatccgctcacgtacttcgagaagcctagtatcatcttggaatcttcgacgcgttgcgctcagcactctaccccgagtgtagcttaggccgatgagtctgggcataccccaccggcgacggtggcccaggctgcgttggcggcctacccatggctaatgtcatgggacgctagttgtgaacaaggtgtgaagagcctattgagctacttgagagtcctccggcccctgaatgcggctaatcctaaccatggagcaagtgcccacaagccagtgggtggcttgtcgtaatgcgcaagtctatggcggaaccgactactttgggtgtccgtgtttccttttattcttattatggctgcttatggtgacaacctaagattgttgtcatatagcttttggattggccatccggtgatctttgagattaatataccttccttattacttcatagtactcatttattcattacactactgtagttaca

SEQ ID NO: 22853 - DNA, 661 bp, synthetic construct
  source 1..661: mol_type = other DNA
gtactctggtatttcggtacccttgtacgcctgttttatctccctccccaatgtaacttagaagctttcaaatcaaagctcaataggtggagcgcaagccagcgcttccgtgagcaagcactcctgtttccccggtgcggttgtatagactgttcccacggttgaaaacaacctatccgttatccgctatagtacttcgagaaacctagtatcacctttggattgttgatgcgttgcgctcagcacactaacccgtgtgtagcttgggtcgatgagtctggacataccccactggtgacagtggtccaggctgcgttggcggcctactcatggtgaaaaccatgagacgctagacatgaacaaggtgtgaagagtctattgagctactatagagtcctccggcccctgaatgcggctaatcttaaccatggagcaagtgctcacaaaccagtgagttgcttgtcgtaatgcgcaagtccgtggcggaaccgactactttgggtgtccgtgtttcactttttacttttatgactgcttatggtgacaatttaatattgttaccatttagctagtcaaattaatcacataaaaactttaaatcctatctaacaattcacatttggatagcttcattttgaggactttaaacctatttacaaag

SEQ ID NO: 22854 - DNA, 611 bp, synthetic construct
  source 1..611: mol_type = other DNA
atgtaacttagaagctttcaaatcaaagctcaataggtggagcgcaagccagcgcttccgtgagcaagcactcctgtttccccggtgcggttgtatagactgttcccacggttgaaaacaacctatccgttatccgctatagtacttcgagaaacctagtatcacctttggattgttgatgcgttgcgctcagcacactaacccgtgtgtagcttgggtcgatgagtctggacataccccactggtgacagtggtccaggctgcgttggcggcctactcatggtgaaaaccatgagacgctagacatgaacaaggtgtgaagagtctattgagctactatagagtcctccggcccctgaatgcggctaatcttaaccatggagcaagtgctcacaaaccagtgagttgcttgtcgtaatgcgcaagtccgtggcggaaccgactactttgggtgtccgtgtttcactttttacttttatgactgcttatggtgacaatttaatattgttaccatttagctagtcaaattaatcacataaaaactttaaatcctatctaacaattcacatttggatagcttcattttgaggactttaaacctatttacaaag

SEQ ID NO: 22855 - DNA, 561 bp, synthetic construct
  source 1..561: mol_type = other DNA
agcgcttccgtgagcaagcactcctgtttccccggtgcggttgtatagactgttcccacggttgaaaacaacctatccgttatccgctatagtacttcgagaaacctagtatcacctttggattgttgatgcgttgcgctcagcacactaacccgtgtgtagcttgggtcgatgagtctggacataccccactggtgacagtggtccaggctgcgttggcggcctactcatggtgaaaaccatgagacgctagacatgaacaaggtgtgaagagtctattgagctactatagagtcctccggcccctgaatgcggctaatcttaaccatggagcaagtgctcacaaaccagtgagttgcttgtcgtaatgcgcaagtccgtggcggaaccgactactttgggtgtccgtgtttcactttttacttttatgactgcttatggtgacaatttaatattgttaccatttagctagtcaaattaatcacataaaaactttaaatcctatctaacaattcacatttggatagcttcattttgaggactttaaacctatttacaaag

SEQ ID NO: 22856 - DNA, 511 bp, synthetic construct
  source 1..511: mol_type = other DNA
tgttcccacggttgaaaacaacctatccgttatccgctatagtacttcgagaaacctagtatcacctttggattgttgatgcgttgcgctcagcacactaacccgtgtgtagcttgggtcgatgagtctggacataccccactggtgacagtggtccaggctgcgttggcggcctactcatggtgaaaaccatgagacgctagacatgaacaaggtgtgaagagtctattgagctactatagagtcctccggcccctgaatgcggctaatcttaaccatggagcaagtgctcacaaaccagtgagttgcttgtcgtaatgcgcaagtccgtggcggaaccgactactttgggtgtccgtgtttcactttttacttttatgactgcttatggtgacaatttaatattgttaccatttagctagtcaaattaatcacataaaaactttaaatcctatctaacaattcacatttggatagcttcattttgaggactttaaacctatttacaaag

SEQ ID NO: 22857 - DNA, 661 bp, synthetic construct
  source 1..661: mol_type = other DNA
gttttatttccccatccccgccgtaacttagaagtctcacttaagcggtcaatagatagcccagtaaaccaactgggttccgaccaggcacttctgttaccccggaccgagtatcaataggctactcacgtggccgaaggagaaaacgttcgttacccggccaattacttcgagaaacttagtaacaccatggaagttgcgcagtgtttcgctccgcacaaccccagtgtagatcaggtcgatgagtcaccgcgtaccccacgggcgaccgtggcggtggctgcgttggcggcctgcccatggggcaacccatgggacgcttcaataccgacatggtgcgaagagtctattgagctaattggtagtcctccggcccctgaatgcggctaatcctaactgcggagcagacgcctacgaaccagtgggtagtctgtcgtaacgggcaactctgcagcggaaccgactactttgggtgtccgtgtttccttttattcttacactggctgcttatggtgacaattgagagattgttaccatatagctattggattggccatccggtgacaaacagagctattgtttatctatttattggtttcataccactaaacttcaaggtcctaggaaccctcaatttaatattactacttaatagtgcaaa

SEQ ID NO: 22858 - DNA, 611 bp, synthetic construct
  source 1..611: mol_type = other DNA
aatagatagcccagtaaaccaactgggttccgaccaggcacttctgttaccccggaccgagtatcaataggctactcacgtggccgaaggagaaaacgttcgttacccggccaattacttcgagaaacttagtaacaccatggaagttgcgcagtgtttcgctccgcacaaccccagtgtagatcaggtcgatgagtcaccgcgtaccccacgggcgaccgtggcggtggctgcgttggcggcctgcccatggggcaacccatgggacgcttcaataccgacatggtgcgaagagtctattgagctaattggtagtcctccggcccctgaatgcggctaatcctaactgcggagcagacgcctacgaaccagtgggtagtctgtcgtaacgggcaactctgcagcggaaccgactactttgggtgtccgtgtttccttttattcttacactggctgcttatggtgacaattgagagattgttaccatatagctattggattggccatccggtgacaaacagagctattgtttatctatttattggtttcataccactaaacttcaaggtcctaggaaccctcaatttaatattactacttaatagtgcaaa

SEQ ID NO: 22859 - DNA, 561 bp, synthetic construct
  source 1..561: mol_type = other DNA
cccggaccgagtatcaataggctactcacgtggccgaaggagaaaacgttcgttacccggccaattacttcgagaaacttagtaacaccatggaagttgcgcagtgtttcgctccgcacaaccccagtgtagatcaggtcgatgagtcaccgcgtaccccacgggcgaccgtggcggtggctgcgttggcggcctgcccatggggcaacccatgggacgcttcaataccgacatggtgcgaagagtctattgagctaattggtagtcctccggcccctgaatgcggctaatcctaactgcggagcagacgcctacgaaccagtgggtagtctgtcgtaacgggcaactctgcagcggaaccgactactttgggtgtccgtgtttccttttattcttacactggctgcttatggtgacaattgagagattgttaccatatagctattggattggccatccggtgacaaacagagctattgtttatctatttattggtttcataccactaaacttcaaggtcctaggaaccctcaatttaatattactacttaatagtgcaaa

SEQ ID NO: 22860 - DNA, 511 bp, synthetic construct
  source 1..511: mol_type = other DNA
cgttacccggccaattacttcgagaaacttagtaacaccatggaagttgcgcagtgtttcgctccgcacaaccccagtgtagatcaggtcgatgagtcaccgcgtaccccacgggcgaccgtggcggtggctgcgttggcggcctgcccatggggcaacccatgggacgcttcaataccgacatggtgcgaagagtctattgagctaattggtagtcctccggcccctgaatgcggctaatcctaactgcggagcagacgcctacgaaccagtgggtagtctgtcgtaacgggcaactctgcagcggaaccgactactttgggtgtccgtgtttccttttattcttacactggctgcttatggtgacaattgagagattgttaccatatagctattggattggccatccggtgacaaacagagctattgtttatctatttattggtttcataccactaaacttcaaggtcctaggaaccctcaatttaatattactacttaatagtgcaaa

SEQ ID NO: 22861 - DNA, 662 bp, synthetic construct
  source 1..662: mol_type = other DNA
cttcttcggaacctgttcggaggaattaaatgggcacccactcacccttcccctcttctcgtaactaagtgtgtgcccaatctcttgactcctactggctccaccgaccggtagtgtccaaaatgctaggtggacttcctcccttcccttctgggcatcttgcccagcttcctccccccagcctgacgtgtcacaggctgtgcaaagaccccgcgaaagctgccaaaagtggcaattgtgggtcccccctttgtcaaggcgtcgagtctttctcccttaaggctagtcccatcagtgaattctgatgggcaactagtgacgccactgcatgcctccgacctcggccgcggagtgctgccccccaagtcgtgcccctgaccacaagttgtgctgtctggcaaacattgtctgtgagaatgttccgctgtggctgccaagcctggtaacaggctgccccagtgtgcgtagttctcatccagacttcggtctggcaacttgttgttaagacacggcgtaaggggcgtgtgccaacgcccaggaacgagtgtccactctaataccccgaggaatgctacgcaggtacccctggtccaccagggatctgagcgtaggctaactgtctaagggtattttcatttcccactctctctttctcgttcata

SEQ ID NO: 22862 - DNA, 612 bp, synthetic construct
  source 1..612: mol_type = other DNA
ccctcttctcgtaactaagtgtgtgcccaatctcttgactcctactggctccaccgaccggtagtgtccaaaatgctaggtggacttcctcccttcccttctgggcatcttgcccagcttcctccccccagcctgacgtgtcacaggctgtgcaaagaccccgcgaaagctgccaaaagtggcaattgtgggtcccccctttgtcaaggcgtcgagtctttctcccttaaggctagtcccatcagtgaattctgatgggcaactagtgacgccactgcatgcctccgacctcggccgcggagtgctgccccccaagtcgtgcccctgaccacaagttgtgctgtctggcaaacattgtctgtgagaatgttccgctgtggctgccaagcctggtaacaggctgccccagtgtgcgtagttctcatccagacttcggtctggcaacttgttgttaagacacggcgtaaggggcgtgtgccaacgcccaggaacgagtgtccactctaataccccgaggaatgctacgcaggtacccctggtccaccagggatctgagcgtaggctaactgtctaagggtattttcatttcccactctctctttctcgttcata

SEQ ID NO: 22863 - DNA, 562 bp, synthetic construct
  source 1..562: mol_type = other DNA
ccaccgaccggtagtgtccaaaatgctaggtggacttcctcccttcccttctgggcatcttgcccagcttcctccccccagcctgacgtgtcacaggctgtgcaaagaccccgcgaaagctgccaaaagtggcaattgtgggtcccccctttgtcaaggcgtcgagtctttctcccttaaggctagtcccatcagtgaattctgatgggcaactagtgacgccactgcatgcctccgacctcggccgcggagtgctgccccccaagtcgtgcccctgaccacaagttgtgctgtctggcaaacattgtctgtgagaatgttccgctgtggctgccaagcctggtaacaggctgccccagtgtgcgtagttctcatccagacttcggtctggcaacttgttgttaagacacggcgtaaggggcgtgtgccaacgcccaggaacgagtgtccactctaataccccgaggaatgctacgcaggtacccctggtccaccagggatctgagcgtaggctaactgtctaagggtattttcatttcccactctctctttctcgttcata

SEQ ID NO: 22864 - DNA, 512 bp, synthetic construct
  source 1..512: mol_type = other DNA
ctgggcatcttgcccagcttcctccccccagcctgacgtgtcacaggctgtgcaaagaccccgcgaaagctgccaaaagtggcaattgtgggtcccccctttgtcaaggcgtcgagtctttctcccttaaggctagtcccatcagtgaattctgatgggcaactagtgacgccactgcatgcctccgacctcggccgcggagtgctgccccccaagtcgtgcccctgaccacaagttgtgctgtctggcaaacattgtctgtgagaatgttccgctgtggctgccaagcctggtaacaggctgccccagtgtgcgtagttctcatccagacttcggtctggcaacttgttgttaagacacggcgtaaggggcgtgtgccaacgcccaggaacgagtgtccactctaataccccgaggaatgctacgcaggtacccctggtccaccagggatctgagcgtaggctaactgtctaagggtattttcatttcccactctctctttctcgttcata

SEQ ID NO: 22865 - DNA, 662 bp, synthetic construct
  source 1..662: mol_type = other DNA
gtactctggtattacggtacctttgtacgcctgttttatatcccctcccccaagtaactttagaagcaattcaaacagttcaatagagggggtacaaaccagtaccaccacgaacaagcacttctgtttccccggtgaagctgtatagactgttcccacggttgaaaatggcagatccgttatccgcttgagtacttcgagaagcctagtatcaccttggaatcttcgacgcgttgcgctcagcactctaccccgagtgtagcttaggtcgatgagtctgggcataccccaccggcgacggtggcccaggctgcgttggcggcctacccatggccaacgccatgggacgctagttgtgaacaaggtgagaagagcctattgagctacttaagagtcctccggcccctgaatgcggctaatcccaaccacggagcaagtgctcacaaaccagtgagtagcttgtcgtaacgcgcaagtctgtggcggaaccgactactttgggtgtccgtgtttccttttatttttactatggctgcttatggtgacaatctaagattgttatcatatagctgttggattggccatccggtgatttattgagatttaacgttcgcctgtttttcttactacatctacccaccagtttcactcatataacaaca

SEQ ID NO: 22866 - DNA, 612 bp, synthetic construct
  source 1..612: mol_type = other DNA
caagtaactttagaagcaattcaaacagttcaatagagggggtacaaaccagtaccaccacgaacaagcacttctgtttccccggtgaagctgtatagactgttcccacggttgaaaatggcagatccgttatccgcttgagtacttcgagaagcctagtatcaccttggaatcttcgacgcgttgcgctcagcactctaccccgagtgtagcttaggtcgatgagtctgggcataccccaccggcgacggtggcccaggctgcgttggcggcctacccatggccaacgccatgggacgctagttgtgaacaaggtgagaagagcctattgagctacttaagagtcctccggcccctgaatgcggctaatcccaaccacggagcaagtgctcacaaaccagtgagtagcttgtcgtaacgcgcaagtctgtggcggaaccgactactttgggtgtccgtgtttccttttatttttactatggctgcttatggtgacaatctaagattgttatcatatagctgttggattggccatccggtgatttattgagatttaacgttcgcctgtttttcttactacatctacccaccagtttcactcatataacaaca

SEQ ID NO: 22867 - DNA, 562 bp, synthetic construct
  source 1..562: mol_type = other DNA
agtaccaccacgaacaagcacttctgtttccccggtgaagctgtatagactgttcccacggttgaaaatggcagatccgttatccgcttgagtacttcgagaagcctagtatcaccttggaatcttcgacgcgttgcgctcagcactctaccccgagtgtagcttaggtcgatgagtctgggcataccccaccggcgacggtggcccaggctgcgttggcggcctacccatggccaacgccatgggacgctagttgtgaacaaggtgagaagagcctattgagctacttaagagtcctccggcccctgaatgcggctaatcccaaccacggagcaagtgctcacaaaccagtgagtagcttgtcgtaacgcgcaagtctgtggcggaaccgactactttgggtgtccgtgtttccttttatttttactatggctgcttatggtgacaatctaagattgttatcatatagctgttggattggccatccggtgatttattgagatttaacgttcgcctgtttttcttactacatctacccaccagtttcactcatataacaaca

SEQ ID NO: 22868 - DNA, 512 bp, synthetic construct
  source 1..512: mol_type = other DNA
tgttcccacggttgaaaatggcagatccgttatccgcttgagtacttcgagaagcctagtatcaccttggaatcttcgacgcgttgcgctcagcactctaccccgagtgtagcttaggtcgatgagtctgggcataccccaccggcgacggtggcccaggctgcgttggcggcctacccatggccaacgccatgggacgctagttgtgaacaaggtgagaagagcctattgagctacttaagagtcctccggcccctgaatgcggctaatcccaaccacggagcaagtgctcacaaaccagtgagtagcttgtcgtaacgcgcaagtctgtggcggaaccgactactttgggtgtccgtgtttccttttatttttactatggctgcttatggtgacaatctaagattgttatcatatagctgttggattggccatccggtgatttattgagatttaacgttcgcctgtttttcttactacatctacccaccagtttcactcatataacaaca

SEQ ID NO: 22869 - DNA, 662 bp, synthetic construct
  source 1..662: mol_type = other DNA
ttatactcccttcccccgtaacttagaagcaatgaaaccaagttcaatagaagggggtacaaaccagtaccaccacgaacaagcacttctgtttccccggtgacgttgcatagactgtccccacggttgaaggcggctgatccgttatccgcttgtgtacttcgagaagcctagtaccatcttggaatctccgatgcgttgcgctcagcactcaaccccagagtgtagcttaggctgatgagtctggacattccccaccggcgacggtggtccaggctgcgttggcggcctacctgtggtccaaaaccacaggacgctagttgtgaacaaggtgtgaagagcctattgagctacatgagagtcctccggcccctgaatgcggctaatcccaaccacggagcaggtgtttgcaatccagcaaatagcctgtcgtaacgcgcaagtctgtggcggaaccgactactttgggtgtccgtgtttccttttattttcatactggctgcttatggtgacaatctcggattgttatcatagagcaaattggattggccatccggtgaaaatcagattgattatttaactttttgttggatttacatctttgacatcacatactccgaatctcattaagatagtgctcttgatacgacatcatcgtcatt

SEQ ID NO: 22870 - DNA, 612 bp, synthetic construct
  source 1..612: mol_type = other DNA
aagggggtacaaaccagtaccaccacgaacaagcacttctgtttccccggtgacgttgcatagactgtccccacggttgaaggcggctgatccgttatccgcttgtgtacttcgagaagcctagtaccatcttggaatctccgatgcgttgcgctcagcactcaaccccagagtgtagcttaggctgatgagtctggacattccccaccggcgacggtggtccaggctgcgttggcggcctacctgtggtccaaaaccacaggacgctagttgtgaacaaggtgtgaagagcctattgagctacatgagagtcctccggcccctgaatgcggctaatcccaaccacggagcaggtgtttgcaatccagcaaatagcctgtcgtaacgcgcaagtctgtggcggaaccgactactttgggtgtccgtgtttccttttattttcatactggctgcttatggtgacaatctcggattgttatcatagagcaaattggattggccatccggtgaaaatcagattgattatttaactttttgttggatttacatctttgacatcacatactccgaatctcattaagatagtgctcttgatacgacatcatcgtcatt

SEQ ID NO: 22871 - DNA, 562 bp, synthetic construct
  source 1..562: mol_type = other DNA
tgacgttgcatagactgtccccacggttgaaggcggctgatccgttatccgcttgtgtacttcgagaagcctagtaccatcttggaatctccgatgcgttgcgctcagcactcaaccccagagtgtagcttaggctgatgagtctggacattccccaccggcgacggtggtccaggctgcgttggcggcctacctgtggtccaaaaccacaggacgctagttgtgaacaaggtgtgaagagcctattgagctacatgagagtcctccggcccctgaatgcggctaatcccaaccacggagcaggtgtttgcaatccagcaaatagcctgtcgtaacgcgcaagtctgtggcggaaccgactactttgggtgtccgtgtttccttttattttcatactggctgcttatggtgacaatctcggattgttatcatagagcaaattggattggccatccggtgaaaatcagattgattatttaactttttgttggatttacatctttgacatcacatactccgaatctcattaagatagtgctcttgatacgacatcatcgtcatt

SEQ ID NO: 22872 - DNA, 512 bp, synthetic construct
  source 1..512: mol_type = other DNA
gcttgtgtacttcgagaagcctagtaccatcttggaatctccgatgcgttgcgctcagcactcaaccccagagtgtagcttaggctgatgagtctggacattccccaccggcgacggtggtccaggctgcgttggcggcctacctgtggtccaaaaccacaggacgctagttgtgaacaaggtgtgaagagcctattgagctacatgagagtcctccggcccctgaatgcggctaatcccaaccacggagcaggtgtttgcaatccagcaaatagcctgtcgtaacgcgcaagtctgtggcggaaccgactactttgggtgtccgtgtttccttttattttcatactggctgcttatggtgacaatctcggattgttatcatagagcaaattggattggccatccggtgaaaatcagattgattatttaactttttgttggatttacatctttgacatcacatactccgaatctcattaagatagtgctcttgatacgacatcatcgtcatt

SEQ ID NO: 22873 - DNA, 663 bp, synthetic construct
  source 1..663: mol_type = other DNA
cttcttcggaacctgttcggaggaattaaacgggcacccactaaccccaacccccttctcgtaactaagtgtgtgcccaatctcttgactcctgctggaaccaccgaccagtagtgtccaaaatgccaggtggaaaatcctcccttcccctctgggctacatgcccagcatcctccccccagcctgacgtgccacaggctgtgcaaagaccccgcgaaagctgccaaaagtggcaattgtgggtcccccctttgtcaaggcgtcgagtctttctcccttaaggctagccccgtcagtgaactctgtcgggcaactagtgacgccactgcatgcctccgacctcggccgcggagtgctgccccccaagtcatgcccctgaccacaagttgtgctgcctggcaagcactgcccgtgagaatgttccgctgtggctgccaagcctggtaacaggctgccccagtgtgcgtagttctcatccagacctcggtctggcaacttgctgttaagacatggcgtaaggggcgtgtgtcaacgccctggaacgagtgtccactctaataccccgaggaatgctacgcaggtacccctggctcgccagggatctgagcgtaggctaattgtctaagggtattttcatttcccactctctctttcttgttcata

SEQ ID NO: 22874 - DNA, 613 bp, synthetic construct
  source 1..613: mol_type = other DNA
cccccttctcgtaactaagtgtgtgcccaatctcttgactcctgctggaaccaccgaccagtagtgtccaaaatgccaggtggaaaatcctcccttcccctctgggctacatgcccagcatcctccccccagcctgacgtgccacaggctgtgcaaagaccccgcgaaagctgccaaaagtggcaattgtgggtcccccctttgtcaaggcgtcgagtctttctcccttaaggctagccccgtcagtgaactctgtcgggcaactagtgacgccactgcatgcctccgacctcggccgcggagtgctgccccccaagtcatgcccctgaccacaagttgtgctgcctggcaagcactgcccgtgagaatgttccgctgtggctgccaagcctggtaacaggctgccccagtgtgcgtagttctcatccagacctcggtctggcaacttgctgttaagacatggcgtaaggggcgtgtgtcaacgccctggaacgagtgtccactctaataccccgaggaatgctacgcaggtacccctggctcgccagggatctgagcgtaggctaattgtctaagggtattttcatttcccactctctctttcttgttcata

SEQ ID NO: 22875 - DNA, 563 bp, synthetic construct
  source 1..563: mol_type = other DNA
ccaccgaccagtagtgtccaaaatgccaggtggaaaatcctcccttcccctctgggctacatgcccagcatcctccccccagcctgacgtgccacaggctgtgcaaagaccccgcgaaagctgccaaaagtggcaattgtgggtcccccctttgtcaaggcgtcgagtctttctcccttaaggctagccccgtcagtgaactctgtcgggcaactagtgacgccactgcatgcctccgacctcggccgcggagtgctgccccccaagtcatgcccctgaccacaagttgtgctgcctggcaagcactgcccgtgagaatgttccgctgtggctgccaagcctggtaacaggctgccccagtgtgcgtagttctcatccagacctcggtctggcaacttgctgttaagacatggcgtaaggggcgtgtgtcaacgccctggaacgagtgtccactctaataccccgaggaatgctacgcaggtacccctggctcgccagggatctgagcgtaggctaattgtctaagggtattttcatttcccactctctctttcttgttcata

SEQ ID NO: 22876 - DNA, 513 bp, synthetic construct
  source 1..513: mol_type = other DNA
tctgggctacatgcccagcatcctccccccagcctgacgtgccacaggctgtgcaaagaccccgcgaaagctgccaaaagtggcaattgtgggtcccccctttgtcaaggcgtcgagtctttctcccttaaggctagccccgtcagtgaactctgtcgggcaactagtgacgccactgcatgcctccgacctcggccgcggagtgctgccccccaagtcatgcccctgaccacaagttgtgctgcctggcaagcactgcccgtgagaatgttccgctgtggctgccaagcctggtaacaggctgccccagtgtgcgtagttctcatccagacctcggtctggcaacttgctgttaagacatggcgtaaggggcgtgtgtcaacgccctggaacgagtgtccactctaataccccgaggaatgctacgcaggtacccctggctcgccagggatctgagcgtaggctaattgtctaagggtattttcatttcccactctctctttcttgttcata

SEQ ID NO: 22877 - DNA, 664 bp, synthetic construct
  source 1..664: mol_type = other DNA
gtactctggtatcacggtacctttgtacgcctgttttatatcccttcccccgcaactttagaagcttaacaaaagttcaacagcaggggtacaaaccagtgcctctacgaacaagcacttctgtttccccggtgaaatcacatagactgtacccacggtcaaaagtgattgatccgttatccgcttgagtacttcgagaagcctagtatcaccttggaatcttcgacgcgttgcgctcaacactctaccccgggtgtagcttaggctgatgagtctgggtactccccaccggtgacggtgacccaggctgcgttggcggcctacccatggctaatgccatgggacgctagttgtgaacaaggtgtgaagagcctattgagctactcaagaatcctccggcccctgaatgcggctaatcctaaccacggagcaatcgctcacgacccagtgagtaggttgtcgtaatgcgtaagtccgtggcggaaccgactactttgggtgtccgtgtttcccttttttattcatattggctgcttatggtgacaatttacagattgttaccatatagctattggattggccatccagtattgtgtcatacatattaaaatacttttctacaagcaataacaacattgtatttgaaccacaatagccattacaa

SEQ ID NO: 22878 - DNA, 614 bp, synthetic construct
  source 1..614: mol_type = other DNA
cgcaactttagaagcttaacaaaagttcaacagcaggggtacaaaccagtgcctctacgaacaagcacttctgtttccccggtgaaatcacatagactgtacccacggtcaaaagtgattgatccgttatccgcttgagtacttcgagaagcctagtatcaccttggaatcttcgacgcgttgcgctcaacactctaccccgggtgtagcttaggctgatgagtctgggtactccccaccggtgacggtgacccaggctgcgttggcggcctacccatggctaatgccatgggacgctagttgtgaacaaggtgtgaagagcctattgagctactcaagaatcctccggcccctgaatgcggctaatcctaaccacggagcaatcgctcacgacccagtgagtaggttgtcgtaatgcgtaagtccgtggcggaaccgactactttgggtgtccgtgtttcccttttttattcatattggctgcttatggtgacaatttacagattgttaccatatagctattggattggccatccagtattgtgtcatacatattaaaatacttttctacaagcaataacaacattgtatttgaaccacaatagccattacaa

SEQ ID NO: 22879 - DNA, 564 bp, synthetic construct
  source 1..564: mol_type = other DNA
gcctctacgaacaagcacttctgtttccccggtgaaatcacatagactgtacccacggtcaaaagtgattgatccgttatccgcttgagtacttcgagaagcctagtatcaccttggaatcttcgacgcgttgcgctcaacactctaccccgggtgtagcttaggctgatgagtctgggtactccccaccggtgacggtgacccaggctgcgttggcggcctacccatggctaatgccatgggacgctagttgtgaacaaggtgtgaagagcctattgagctactcaagaatcctccggcccctgaatgcggctaatcctaaccacggagcaatcgctcacgacccagtgagtaggttgtcgtaatgcgtaagtccgtggcggaaccgactactttgggtgtccgtgtttcccttttttattcatattggctgcttatggtgacaatttacagattgttaccatatagctattggattggccatccagtattgtgtcatacatattaaaatacttttctacaagcaataacaacattgtatttgaaccacaatagccattacaa

SEQ ID NO: 22880 - DNA, 514 bp, synthetic construct
  source 1..514: mol_type = other DNA
acccacggtcaaaagtgattgatccgttatccgcttgagtacttcgagaagcctagtatcaccttggaatcttcgacgcgttgcgctcaacactctaccccgggtgtagcttaggctgatgagtctgggtactccccaccggtgacggtgacccaggctgcgttggcggcctacccatggctaatgccatgggacgctagttgtgaacaaggtgtgaagagcctattgagctactcaagaatcctccggcccctgaatgcggctaatcctaaccacggagcaatcgctcacgacccagtgagtaggttgtcgtaatgcgtaagtccgtggcggaaccgactactttgggtgtccgtgtttcccttttttattcatattggctgcttatggtgacaatttacagattgttaccatatagctattggattggccatccagtattgtgtcatacatattaaaatacttttctacaagcaataacaacattgtatttgaaccacaatagccattacaa

SEQ ID NO: 22881 - DNA, 664 bp, synthetic construct
  source 1..664: mol_type = other DNA
gtactctggtatcacggtacctttgtacgcctgttttatatccccttcccccgcaacttagaagaaaacaaatcaagttcactaggagggggtacaaaccagtaccaccacgaacaagcacttctgtttccccggtgatgtcgtatagactgtaaccacggttgaaaacgattgatccgttatccgctcttgtacttcgaaaagcccagtatcaccttggaatcttcgatgcgttgcgctcagcactcaaccccagagtgtagcttaggtcgatgagtctggacactcctcaccggcgacggtggtccaggctgcgttggcggcctacctgtggtccaaagccacaggacgctagttgtgaacaaggtgtgaagagcctattgagctacaagagaatcctccggcccctgaatgcggctaatcctaaccacggagcaagggtacacaaaccagtgtatatcttgtcgtaacgcgcaagtctgtggcggaaccgactactttgggtgtccgtgtttccttttgtttttatcatggctgcttatggtgacaatctaagattgttatcatatagctgttggattggccatccggtaatttattgagatttgagcatttgcttgtttcttcaacaatttcacctattcattgcatttcagcagtcaaa

SEQ ID NO: 22882 - DNA, 614 bp, synthetic construct
  source 1..614: mol_type = other DNA
ccgcaacttagaagaaaacaaatcaagttcactaggagggggtacaaaccagtaccaccacgaacaagcacttctgtttccccggtgatgtcgtatagactgtaaccacggttgaaaacgattgatccgttatccgctcttgtacttcgaaaagcccagtatcaccttggaatcttcgatgcgttgcgctcagcactcaaccccagagtgtagcttaggtcgatgagtctggacactcctcaccggcgacggtggtccaggctgcgttggcggcctacctgtggtccaaagccacaggacgctagttgtgaacaaggtgtgaagagcctattgagctacaagagaatcctccggcccctgaatgcggctaatcctaaccacggagcaagggtacacaaaccagtgtatatcttgtcgtaacgcgcaagtctgtggcggaaccgactactttgggtgtccgtgtttccttttgtttttatcatggctgcttatggtgacaatctaagattgttatcatatagctgttggattggccatccggtaatttattgagatttgagcatttgcttgtttcttcaacaatttcacctattcattgcatttcagcagtcaaa

SEQ ID NO: 22883 - DNA, 564 bp, synthetic construct
  source 1..564: mol_type = other DNA
agtaccaccacgaacaagcacttctgtttccccggtgatgtcgtatagactgtaaccacggttgaaaacgattgatccgttatccgctcttgtacttcgaaaagcccagtatcaccttggaatcttcgatgcgttgcgctcagcactcaaccccagagtgtagcttaggtcgatgagtctggacactcctcaccggcgacggtggtccaggctgcgttggcggcctacctgtggtccaaagccacaggacgctagttgtgaacaaggtgtgaagagcctattgagctacaagagaatcctccggcccctgaatgcggctaatcctaaccacggagcaagggtacacaaaccagtgtatatcttgtcgtaacgcgcaagtctgtggcggaaccgactactttgggtgtccgtgtttccttttgtttttatcatggctgcttatggtgacaatctaagattgttatcatatagctgttggattggccatccggtaatttattgagatttgagcatttgcttgtttcttcaacaatttcacctattcattgcatttcagcagtcaaa

SEQ ID NO: 22884 - DNA, 514 bp, synthetic construct
  source 1..514: mol_type = other DNA
tgtaaccacggttgaaaacgattgatccgttatccgctcttgtacttcgaaaagcccagtatcaccttggaatcttcgatgcgttgcgctcagcactcaaccccagagtgtagcttaggtcgatgagtctggacactcctcaccggcgacggtggtccaggctgcgttggcggcctacctgtggtccaaagccacaggacgctagttgtgaacaaggtgtgaagagcctattgagctacaagagaatcctccggcccctgaatgcggctaatcctaaccacggagcaagggtacacaaaccagtgtatatcttgtcgtaacgcgcaagtctgtggcggaaccgactactttgggtgtccgtgtttccttttgtttttatcatggctgcttatggtgacaatctaagattgttatcatatagctgttggattggccatccggtaatttattgagatttgagcatttgcttgtttcttcaacaatttcacctattcattgcatttcagcagtcaaa

SEQ ID NO: 22885 - DNA, 665 bp, synthetic construct
  source 1..665: mol_type = other DNA
ctgttttatacacccttcccccaaaagaaacttagaagcttgactataacggtcaataggaaacccagtataccagctgggttacgaccaagcacttctgtaaccccggactgagtatcaataggctgctcacgcggctgaaggagaaaacgttcgttacccggccaattacttcgagaaacctagtaccaccatgaaagttgcgcggcgtttcgctccgcacaatcccagtgtagatcaggtcgatgagccaccgcgttccccacgggtgaccgtggcggtggctgcgttggcggcctgcccatggggcaacccatgggacgcttcaatactgacatggtgcgaagagtctattgagctaattggtagtcctccggcccctgaatgcggctaatcctaactgcggagcagatacccacataccagtgggctgtctgtcgtaacgggtaactccgcagcggaaccgactactttgggtgtccgtgtttccttttattcttatactggctgcttatggtgacaattgagagattgttaccatatagctattggattggccatccggtgtctaacagagcgatcatctatctgtttgttggtttcatacccttgaattttaaagtcctcaacactcttaaccttgtgctacaactaaactcggtaaa

SEQ ID NO: 22886 - DNA, 615 bp, synthetic construct
  source 1..615: mol_type = other DNA
ggtcaataggaaacccagtataccagctgggttacgaccaagcacttctgtaaccccggactgagtatcaataggctgctcacgcggctgaaggagaaaacgttcgttacccggccaattacttcgagaaacctagtaccaccatgaaagttgcgcggcgtttcgctccgcacaatcccagtgtagatcaggtcgatgagccaccgcgttccccacgggtgaccgtggcggtggctgcgttggcggcctgcccatggggcaacccatgggacgcttcaatactgacatggtgcgaagagtctattgagctaattggtagtcctccggcccctgaatgcggctaatcctaactgcggagcagatacccacataccagtgggctgtctgtcgtaacgggtaactccgcagcggaaccgactactttgggtgtccgtgtttccttttattcttatactggctgcttatggtgacaattgagagattgttaccatatagctattggattggccatccggtgtctaacagagcgatcatctatctgtttgttggtttcatacccttgaattttaaagtcctcaacactcttaaccttgtgctacaactaaactcggtaaa

SEQ ID NO: 22887 - DNA, 565 bp, synthetic construct
  source 1..565: mol_type = other DNA
taaccccggactgagtatcaataggctgctcacgcggctgaaggagaaaacgttcgttacccggccaattacttcgagaaacctagtaccaccatgaaagttgcgcggcgtttcgctccgcacaatcccagtgtagatcaggtcgatgagccaccgcgttccccacgggtgaccgtggcggtggctgcgttggcggcctgcccatggggcaacccatgggacgcttcaatactgacatggtgcgaagagtctattgagctaattggtagtcctccggcccctgaatgcggctaatcctaactgcggagcagatacccacataccagtgggctgtctgtcgtaacgggtaactccgcagcggaaccgactactttgggtgtccgtgtttccttttattcttatactggctgcttatggtgacaattgagagattgttaccatatagctattggattggccatccggtgtctaacagagcgatcatctatctgtttgttggtttcatacccttgaattttaaagtcctcaacactcttaaccttgtgctacaactaaactcggtaaa

SEQ ID NO: 22888 - DNA, 515 bp, synthetic construct
  source 1..515: mol_type = other DNA
cgttcgttacccggccaattacttcgagaaacctagtaccaccatgaaagttgcgcggcgtttcgctccgcacaatcccagtgtagatcaggtcgatgagccaccgcgttccccacgggtgaccgtggcggtggctgcgttggcggcctgcccatggggcaacccatgggacgcttcaatactgacatggtgcgaagagtctattgagctaattggtagtcctccggcccctgaatgcggctaatcctaactgcggagcagatacccacataccagtgggctgtctgtcgtaacgggtaactccgcagcggaaccgactactttgggtgtccgtgtttccttttattcttatactggctgcttatggtgacaattgagagattgttaccatatagctattggattggccatccggtgtctaacagagcgatcatctatctgtttgttggtttcatacccttgaattttaaagtcctcaacactcttaaccttgtgctacaactaaactcggtaaa

SEQ ID NO: 22889 - DNA, 665 bp, synthetic construct
  source 1..665: mol_type = other DNA
acctttgtacgcctgttttatacccccttcccccgcaacttagaagcatgaaatcttaagctcaacaggaggggtgcaaaccagcacctctacgagcaagcactactgtctccccggtgaggttacatagactgttcccacggttgaaagtagccgatccgttatccgctcatgtacttcgagaagcctagtattgctctggaatcttcgatgcgttgcgctcaacactcgaccccggagtgtagcttaggccgatgagtctggacattccccactggcgacagtggtccaggctgcgttggcggcctacctgtggtccaaagccacaggacgctagttgtgaacagggtgtgaagagcctattgagctacatgagagtcctccggcccctgaatgcggctaatcccaaccatggagcaggcaactgcaacccagcagtcagcctgtcgtaacgcgcaagtccgtggcggaaccgactactttgggtgtccgtgtttccttttatcttttgaatggctgcttatggtgacaatcatagattgttatcataaagcgaattggattggccatccagagaattactaccgtgtttattgagtctactcttgaaaaacctaactcctcaacgtactagaattatttgaagacaggatatcgacacgaca

SEQ ID NO: 22890 - DNA, 615 bp, synthetic construct
  source 1..615: mol_type = other DNA
aaatcttaagctcaacaggaggggtgcaaaccagcacctctacgagcaagcactactgtctccccggtgaggttacatagactgttcccacggttgaaagtagccgatccgttatccgctcatgtacttcgagaagcctagtattgctctggaatcttcgatgcgttgcgctcaacactcgaccccggagtgtagcttaggccgatgagtctggacattccccactggcgacagtggtccaggctgcgttggcggcctacctgtggtccaaagccacaggacgctagttgtgaacagggtgtgaagagcctattgagctacatgagagtcctccggcccctgaatgcggctaatcccaaccatggagcaggcaactgcaacccagcagtcagcctgtcgtaacgcgcaagtccgtggcggaaccgactactttgggtgtccgtgtttccttttatcttttgaatggctgcttatggtgacaatcatagattgttatcataaagcgaattggattggccatccagagaattactaccgtgtttattgagtctactcttgaaaaacctaactcctcaacgtactagaattatttgaagacaggatatcgacacgaca

SEQ ID NO: 22891 - DNA, 565 bp, synthetic construct
  source 1..565: mol_type = other DNA
cactactgtctccccggtgaggttacatagactgttcccacggttgaaagtagccgatccgttatccgctcatgtacttcgagaagcctagtattgctctggaatcttcgatgcgttgcgctcaacactcgaccccggagtgtagcttaggccgatgagtctggacattccccactggcgacagtggtccaggctgcgttggcggcctacctgtggtccaaagccacaggacgctagttgtgaacagggtgtgaagagcctattgagctacatgagagtcctccggcccctgaatgcggctaatcccaaccatggagcaggcaactgcaacccagcagtcagcctgtcgtaacgcgcaagtccgtggcggaaccgactactttgggtgtccgtgtttccttttatcttttgaatggctgcttatggtgacaatcatagattgttatcataaagcgaattggattggccatccagagaattactaccgtgtttattgagtctactcttgaaaaacctaactcctcaacgtactagaattatttgaagacaggatatcgacacgaca

SEQ ID NO: 22892 - DNA, 515 bp, synthetic construct
  source 1..515: mol_type = other DNA
tagccgatccgttatccgctcatgtacttcgagaagcctagtattgctctggaatcttcgatgcgttgcgctcaacactcgaccccggagtgtagcttaggccgatgagtctggacattccccactggcgacagtggtccaggctgcgttggcggcctacctgtggtccaaagccacaggacgctagttgtgaacagggtgtgaagagcctattgagctacatgagagtcctccggcccctgaatgcggctaatcccaaccatggagcaggcaactgcaacccagcagtcagcctgtcgtaacgcgcaagtccgtggcggaaccgactactttgggtgtccgtgtttccttttatcttttgaatggctgcttatggtgacaatcatagattgttatcataaagcgaattggattggccatccagagaattactaccgtgtttattgagtctactcttgaaaaacctaactcctcaacgtactagaattatttgaagacaggatatcgacacgaca

SEQ ID NO: 22893 - DNA, 666 bp, synthetic construct
  source 1..666: mol_type = other DNA
tctggtatcacggtacctttgtacgcctattttacatcccttccccgtaacttagaagctttcaactataagttcactagcagggctaccaaccaggtagttcatcgaacaagcacttctgttaccccggtcctagtacctgagaagctgtacccacggcggaaggggaaaaagatcgttacccggctatctacttcgagaagcctagtaacgtcattgaaactcttgagcgttgcgttcagcacagtaccccctgtgtagctttggctgatgagtctgggcattccccactggcgacagtggcccaggctgcgttggcggccaaccgatccgggcaaccgggtcggacgctcatttgtggacatggtgtgaagagcctattgagctaggtagtagtcctccggcccctgaatgcggctaatcccaactccggagcaagtgcgcacaatccagtgtgtggcttgtcgtaatgcgtaagtctggagcggaaccgactactttgggtgtccgtgtttcctgtttttccttatttggctgcttatggtgacaatctagtgttgttaccatatagcgattggattggccatccggtgaatagctttgtgacaattccctacgttatttttcataactcaacttcacgagagtcattgagtttgactaatt

SEQ ID NO: 22894 - DNA, 616 bp, synthetic construct
  source 1..616: mol_type = other DNA
cttagaagctttcaactataagttcactagcagggctaccaaccaggtagttcatcgaacaagcacttctgttaccccggtcctagtacctgagaagctgtacccacggcggaaggggaaaaagatcgttacccggctatctacttcgagaagcctagtaacgtcattgaaactcttgagcgttgcgttcagcacagtaccccctgtgtagctttggctgatgagtctgggcattccccactggcgacagtggcccaggctgcgttggcggccaaccgatccgggcaaccgggtcggacgctcatttgtggacatggtgtgaagagcctattgagctaggtagtagtcctccggcccctgaatgcggctaatcccaactccggagcaagtgcgcacaatccagtgtgtggcttgtcgtaatgcgtaagtctggagcggaaccgactactttgggtgtccgtgtttcctgtttttccttatttggctgcttatggtgacaatctagtgttgttaccatatagcgattggattggccatccggtgaatagctttgtgacaattccctacgttatttttcataactcaacttcacgagagtcattgagtttgactaatt

SEQ ID NO: 22895 - DNA, 566 bp, synthetic construct
  source 1..566: mol_type = other DNA
ttcatcgaacaagcacttctgttaccccggtcctagtacctgagaagctgtacccacggcggaaggggaaaaagatcgttacccggctatctacttcgagaagcctagtaacgtcattgaaactcttgagcgttgcgttcagcacagtaccccctgtgtagctttggctgatgagtctgggcattccccactggcgacagtggcccaggctgcgttggcggccaaccgatccgggcaaccgggtcggacgctcatttgtggacatggtgtgaagagcctattgagctaggtagtagtcctccggcccctgaatgcggctaatcccaactccggagcaagtgcgcacaatccagtgtgtggcttgtcgtaatgcgtaagtctggagcggaaccgactactttgggtgtccgtgtttcctgtttttccttatttggctgcttatggtgacaatctagtgttgttaccatatagcgattggattggccatccggtgaatagctttgtgacaattccctacgttatttttcataactcaacttcacgagagtcattgagtttgactaatt

SEQ ID NO: 22896 - DNA, 516 bp, synthetic construct
  source 1..516: mol_type = other DNA
tacccacggcggaaggggaaaaagatcgttacccggctatctacttcgagaagcctagtaacgtcattgaaactcttgagcgttgcgttcagcacagtaccccctgtgtagctttggctgatgagtctgggcattccccactggcgacagtggcccaggctgcgttggcggccaaccgatccgggcaaccgggtcggacgctcatttgtggacatggtgtgaagagcctattgagctaggtagtagtcctccggcccctgaatgcggctaatcccaactccggagcaagtgcgcacaatccagtgtgtggcttgtcgtaatgcgtaagtctggagcggaaccgactactttgggtgtccgtgtttcctgtttttccttatttggctgcttatggtgacaatctagtgttgttaccatatagcgattggattggccatccggtgaatagctttgtgacaattccctacgttatttttcataactcaacttcacgagagtcattgagtttgactaatt

SEQ ID NO: 22897 - DNA, 666 bp, synthetic construct
  source 1..666: mol_type = other DNA
cctgttttataccccctttcccgctttgtaacttagaagtaacacaacttcggtcaatagtcgacgcaacaacccagttgcgttttgatcaagcacctctgtgaccccggactgagtatcaataggctgctcgcgcggctgaaggagaaaccgttcgttacccggctaactacttcgagaagcctagtagcatcatgaacgttgcggagtgtttcgctcagcacttcccccgtgtagatcaggtcgatgagtcaccgcgttccccacgggtgaccgtggcggtggctgcgttggcggcctgcctgtggggcaacccacaggacgctctaatacagacatggtgcgaagagtctattgagctagttagtagtcctccggcccctgaatgcggctaatcctaactgcggagcacattctcacaagccagtgagcggtgtgtcgtaacgggcaactctgcagcggaaccgactactttgggtgtccgtgtttccttttattctaatactggctgcttatggtgacaattgagagattgttaccatatagctattggattggccatccggtgtctaacagagcaattatttacctgtttgttggtttcacacccctaaatctcaaggttttaaataccctcaatttcgtactgaaactaaactcagtaaa

SEQ ID NO: 22898 - DNA, 616 bp, synthetic construct
  source 1..616: mol_type = other DNA
cggtcaatagtcgacgcaacaacccagttgcgttttgatcaagcacctctgtgaccccggactgagtatcaataggctgctcgcgcggctgaaggagaaaccgttcgttacccggctaactacttcgagaagcctagtagcatcatgaacgttgcggagtgtttcgctcagcacttcccccgtgtagatcaggtcgatgagtcaccgcgttccccacgggtgaccgtggcggtggctgcgttggcggcctgcctgtggggcaacccacaggacgctctaatacagacatggtgcgaagagtctattgagctagttagtagtcctccggcccctgaatgcggctaatcctaactgcggagcacattctcacaagccagtgagcggtgtgtcgtaacgggcaactctgcagcggaaccgactactttgggtgtccgtgtttccttttattctaatactggctgcttatggtgacaattgagagattgttaccatatagctattggattggccatccggtgtctaacagagcaattatttacctgtttgttggtttcacacccctaaatctcaaggttttaaataccctcaatttcgtactgaaactaaactcagtaaa

SEQ ID NO: 22899 - DNA, 566 bp, synthetic construct
  source 1..566: mol_type = other DNA
gtgaccccggactgagtatcaataggctgctcgcgcggctgaaggagaaaccgttcgttacccggctaactacttcgagaagcctagtagcatcatgaacgttgcggagtgtttcgctcagcacttcccccgtgtagatcaggtcgatgagtcaccgcgttccccacgggtgaccgtggcggtggctgcgttggcggcctgcctgtggggcaacccacaggacgctctaatacagacatggtgcgaagagtctattgagctagttagtagtcctccggcccctgaatgcggctaatcctaactgcggagcacattctcacaagccagtgagcggtgtgtcgtaacgggcaactctgcagcggaaccgactactttgggtgtccgtgtttccttttattctaatactggctgcttatggtgacaattgagagattgttaccatatagctattggattggccatccggtgtctaacagagcaattatttacctgtttgttggtttcacacccctaaatctcaaggttttaaataccctcaatttcgtactgaaactaaactcagtaaa

SEQ ID NO: 22900 - DNA, 516 bp, synthetic construct
  source 1..516: mol_type = other DNA
ccgttcgttacccggctaactacttcgagaagcctagtagcatcatgaacgttgcggagtgtttcgctcagcacttcccccgtgtagatcaggtcgatgagtcaccgcgttccccacgggtgaccgtggcggtggctgcgttggcggcctgcctgtggggcaacccacaggacgctctaatacagacatggtgcgaagagtctattgagctagttagtagtcctccggcccctgaatgcggctaatcctaactgcggagcacattctcacaagccagtgagcggtgtgtcgtaacgggcaactctgcagcggaaccgactactttgggtgtccgtgtttccttttattctaatactggctgcttatggtgacaattgagagattgttaccatatagctattggattggccatccggtgtctaacagagcaattatttacctgtttgttggtttcacacccctaaatctcaaggttttaaataccctcaatttcgtactgaaactaaactcagtaaa

SEQ ID NO: 22901 - DNA, 666 bp, synthetic construct
  source 1..666: mol_type = other DNA
tggtacttcggtacctttgtacgcctgttttatctcccttcccaatgtaacttagaagttcttaaatcaatgctcaataggtggggcgcaaaccagcgctctcatgagcaagcactcctgtctccccggtgaggttgtataaactgttcccacggttgaaaacaacctatccgttatccgctatagtacttcgagaaacctagtaccacctttggattgttgacgcgttgcgctcagcacactaacccgtgtgtagcttgggtcgatgagtctggacatacctcactggcgacagtggtccaggctgcgttggcggcctactcatggtgaaagccatgagacgctagacatgaacaaggtgtgaagagtctattgagctactatagagtcctccggcccctgaatgcggctaatcctaaccatggagcaagtgctcacaggccagtgagttgcttgtcgtaatgcgcaagtccgtggcggaaccgactactttgggtgtccgtgtttcactttttacttttatgactgcttatggtgacaatttgatattgttaccatttagcttgtcaaatcaattgcaaaagatcctaactcttatttatcaacttgcatctcgataactctaatttgaaaatatcatctctaaccaatttgaaaattttaaca

SEQ ID NO: 22902 - DNA, 616 bp, synthetic construct
  source 1..616: mol_type = other DNA
cttagaagttcttaaatcaatgctcaataggtggggcgcaaaccagcgctctcatgagcaagcactcctgtctccccggtgaggttgtataaactgttcccacggttgaaaacaacctatccgttatccgctatagtacttcgagaaacctagtaccacctttggattgttgacgcgttgcgctcagcacactaacccgtgtgtagcttgggtcgatgagtctggacatacctcactggcgacagtggtccaggctgcgttggcggcctactcatggtgaaagccatgagacgctagacatgaacaaggtgtgaagagtctattgagctactatagagtcctccggcccctgaatgcggctaatcctaaccatggagcaagtgctcacaggccagtgagttgcttgtcgtaatgcgcaagtccgtggcggaaccgactactttgggtgtccgtgtttcactttttacttttatgactgcttatggtgacaatttgatattgttaccatttagcttgtcaaatcaattgcaaaagatcctaactcttatttatcaacttgcatctcgataactctaatttgaaaatatcatctctaaccaatttgaaaattttaaca

SEQ ID NO: 22903 - DNA, 566 bp, synthetic construct
  source 1..566: mol_type = other DNA
ctcatgagcaagcactcctgtctccccggtgaggttgtataaactgttcccacggttgaaaacaacctatccgttatccgctatagtacttcgagaaacctagtaccacctttggattgttgacgcgttgcgctcagcacactaacccgtgtgtagcttgggtcgatgagtctggacatacctcactggcgacagtggtccaggctgcgttggcggcctactcatggtgaaagccatgagacgctagacatgaacaaggtgtgaagagtctattgagctactatagagtcctccggcccctgaatgcggctaatcctaaccatggagcaagtgctcacaggccagtgagttgcttgtcgtaatgcgcaagtccgtggcggaaccgactactttgggtgtccgtgtttcactttttacttttatgactgcttatggtgacaatttgatattgttaccatttagcttgtcaaatcaattgcaaaagatcctaactcttatttatcaacttgcatctcgataactctaatttgaaaatatcatctctaaccaatttgaaaattttaaca

SEQ ID NO: 22904 - DNA, 516 bp, synthetic construct
  source 1..516: mol_type = other DNA
cacggttgaaaacaacctatccgttatccgctatagtacttcgagaaacctagtaccacctttggattgttgacgcgttgcgctcagcacactaacccgtgtgtagcttgggtcgatgagtctggacatacctcactggcgacagtggtccaggctgcgttggcggcctactcatggtgaaagccatgagacgctagacatgaacaaggtgtgaagagtctattgagctactatagagtcctccggcccctgaatgcggctaatcctaaccatggagcaagtgctcacaggccagtgagttgcttgtcgtaatgcgcaagtccgtggcggaaccgactactttgggtgtccgtgtttcactttttacttttatgactgcttatggtgacaatttgatattgttaccatttagcttgtcaaatcaattgcaaaagatcctaactcttatttatcaacttgcatctcgataactctaatttgaaaatatcatctctaaccaatttgaaaattttaaca

SEQ ID NO: 22905 - DNA, 667 bp, synthetic construct
  source 1..667: mol_type = other DNA
ctgttttataaccctcccccgaaacttgcaacttagaagttatgtacgttactgatcaacagcaggcgtggcacaccagccatgtcttgatcaagcacttctgtaaccccggactgagtatcaatagactgctcacgtggtcgaaagagaaaacgttcgttatccggctaactacttcgagaaacttagtagcaccactgaaactgcggagtgtttcgctcagcacttcccccgtgtagatcaggtcgatgagtcactgcttaccccacgggtgaccgtggcagtggctgcgttggcggcctgcctatggggcaacccataggacgctctaaagtggacatggtgtgaagagtctattgagctagttagtagtcctccggcccctgaatgcggctaatcctaactgcggagcacatgccctcaatccagggggtggtgtgtcgtaacgggcaactctgcagcggaaccgactactttgggtgtccgtgtttcttttattctcataatggctgcttatggtgacaattgaggaattgttgccatatagctattggattggccatccagtgacaaacagagctttgatatacttgttcgtgggtttcgttccactcaccagtcgtacagttcatactctaaagtacattctgattctgaacaatagaaa

SEQ ID NO: 22906 - DNA, 617 bp, synthetic construct
  source 1..617: mol_type = other DNA
actgatcaacagcaggcgtggcacaccagccatgtcttgatcaagcacttctgtaaccccggactgagtatcaatagactgctcacgtggtcgaaagagaaaacgttcgttatccggctaactacttcgagaaacttagtagcaccactgaaactgcggagtgtttcgctcagcacttcccccgtgtagatcaggtcgatgagtcactgcttaccccacgggtgaccgtggcagtggctgcgttggcggcctgcctatggggcaacccataggacgctctaaagtggacatggtgtgaagagtctattgagctagttagtagtcctccggcccctgaatgcggctaatcctaactgcggagcacatgccctcaatccagggggtggtgtgtcgtaacgggcaactctgcagcggaaccgactactttgggtgtccgtgtttcttttattctcataatggctgcttatggtgacaattgaggaattgttgccatatagctattggattggccatccagtgacaaacagagctttgatatacttgttcgtgggtttcgttccactcaccagtcgtacagttcatactctaaagtacattctgattctgaacaatagaaa

SEQ ID NO: 22907 - DNA, 567 bp, synthetic construct
  source 1..567: mol_type = other DNA
ctgtaaccccggactgagtatcaatagactgctcacgtggtcgaaagagaaaacgttcgttatccggctaactacttcgagaaacttagtagcaccactgaaactgcggagtgtttcgctcagcacttcccccgtgtagatcaggtcgatgagtcactgcttaccccacgggtgaccgtggcagtggctgcgttggcggcctgcctatggggcaacccataggacgctctaaagtggacatggtgtgaagagtctattgagctagttagtagtcctccggcccctgaatgcggctaatcctaactgcggagcacatgccctcaatccagggggtggtgtgtcgtaacgggcaactctgcagcggaaccgactactttgggtgtccgtgtttcttttattctcataatggctgcttatggtgacaattgaggaattgttgccatatagctattggattggccatccagtgacaaacagagctttgatatacttgttcgtgggtttcgttccactcaccagtcgtacagttcatactctaaagtacattctgattctgaacaatagaaa

SEQ ID NO: 22908 - DNA, 517 bp, synthetic construct
  source 1..517: mol_type = other DNA
aaacgttcgttatccggctaactacttcgagaaacttagtagcaccactgaaactgcggagtgtttcgctcagcacttcccccgtgtagatcaggtcgatgagtcactgcttaccccacgggtgaccgtggcagtggctgcgttggcggcctgcctatggggcaacccataggacgctctaaagtggacatggtgtgaagagtctattgagctagttagtagtcctccggcccctgaatgcggctaatcctaactgcggagcacatgccctcaatccagggggtggtgtgtcgtaacgggcaactctgcagcggaaccgactactttgggtgtccgtgtttcttttattctcataatggctgcttatggtgacaattgaggaattgttgccatatagctattggattggccatccagtgacaaacagagctttgatatacttgttcgtgggtttcgttccactcaccagtcgtacagttcatactctaaagtacattctgattctgaacaatagaaa

SEQ ID NO: 22909 - DNA, 667 bp, synthetic construct
  source 1..667: mol_type = other DNA
tacaccggtatcacggtacccttgtacgcctgttttataatccccttcccccgtaacattagaagcacaaaagcaaccgctcaatagacaccatacatccagtgtggttacgagcaagcacttctgtctccccggttgcgccctatatgctgtgcgaacggcaaaaaggggcaatatcgttacccgcttgactactacgggaaacccagtatcatcttcgattgatttgagagttgcgttcagcgccttacccccggcgtagctcaggctgatgaggctccgaacaccccacaggcgactgtgtcggagcctgcgttggcggcctgcccataccctgcggtatgggacgctcacttcatgacatggtgcgaagagtctactgtgctagtcaagattcctccggcccctgaatgtggataatcccaaccactgatcctacgttcgcaatccagcgttcagtaggtcgtaacgcgcaagtcggtggcggaaccaactactttgggtgtccgtgtttcctttatttcctactgaatgcttatggtgacaattgttttgatcagttgttgccaatactcgcgttcagtgtgtaattacaaaaacaagattatcagttattacaatccctcacgttcagtgcacaattacgaaaacgagattttctgtcata

SEQ ID NO: 22910 - DNA, 617 bp, synthetic construct
  source 1..617: mol_type = other DNA
ccgtaacattagaagcacaaaagcaaccgctcaatagacaccatacatccagtgtggttacgagcaagcacttctgtctccccggttgcgccctatatgctgtgcgaacggcaaaaaggggcaatatcgttacccgcttgactactacgggaaacccagtatcatcttcgattgatttgagagttgcgttcagcgccttacccccggcgtagctcaggctgatgaggctccgaacaccccacaggcgactgtgtcggagcctgcgttggcggcctgcccataccctgcggtatgggacgctcacttcatgacatggtgcgaagagtctactgtgctagtcaagattcctccggcccctgaatgtggataatcccaaccactgatcctacgttcgcaatccagcgttcagtaggtcgtaacgcgcaagtcggtggcggaaccaactactttgggtgtccgtgtttcctttatttcctactgaatgcttatggtgacaattgttttgatcagttgttgccaatactcgcgttcagtgtgtaattacaaaaacaagattatcagttattacaatccctcacgttcagtgcacaattacgaaaacgagattttctgtcata

SEQ ID NO: 22911 - DNA, 567 bp, synthetic construct
  source 1..567: mol_type = other DNA
agtgtggttacgagcaagcacttctgtctccccggttgcgccctatatgctgtgcgaacggcaaaaaggggcaatatcgttacccgcttgactactacgggaaacccagtatcatcttcgattgatttgagagttgcgttcagcgccttacccccggcgtagctcaggctgatgaggctccgaacaccccacaggcgactgtgtcggagcctgcgttggcggcctgcccataccctgcggtatgggacgctcacttcatgacatggtgcgaagagtctactgtgctagtcaagattcctccggcccctgaatgtggataatcccaaccactgatcctacgttcgcaatccagcgttcagtaggtcgtaacgcgcaagtcggtggcggaaccaactactttgggtgtccgtgtttcctttatttcctactgaatgcttatggtgacaattgttttgatcagttgttgccaatactcgcgttcagtgtgtaattacaaaaacaagattatcagttattacaatccctcacgttcagtgcacaattacgaaaacgagattttctgtcata

SEQ ID NO: 22912 - DNA, 517 bp, synthetic construct
  source 1..517: mol_type = other DNA
tgtgcgaacggcaaaaaggggcaatatcgttacccgcttgactactacgggaaacccagtatcatcttcgattgatttgagagttgcgttcagcgccttacccccggcgtagctcaggctgatgaggctccgaacaccccacaggcgactgtgtcggagcctgcgttggcggcctgcccataccctgcggtatgggacgctcacttcatgacatggtgcgaagagtctactgtgctagtcaagattcctccggcccctgaatgtggataatcccaaccactgatcctacgttcgcaatccagcgttcagtaggtcgtaacgcgcaagtcggtggcggaaccaactactttgggtgtccgtgtttcctttatttcctactgaatgcttatggtgacaattgttttgatcagttgttgccaatactcgcgttcagtgtgtaattacaaaaacaagattatcagttattacaatccctcacgttcagtgcacaattacgaaaacgagattttctgtcata

SEQ ID NO: 22913 - DNA, 669 bp, synthetic construct
  source 1..669: mol_type = other DNA
ctgttttataacccctcccccaaactatgtaacttagaagttatgcactctaccgatcaacagcaggcatggcgctccagccatgtctcgatcaagcacttctgtttccccggactgagtatcaatagactgctcacgtggtcgaaggagaaaacgttcgttatccgactaactacttcgagaagcctagtagcaccatcgagactgcggagcgtttcgttcagcactccccccgtgtagatcaggtcgatgagtcactgcataccccacgggcgaccgtggcagtggctgcgttggcggcctgcctatggggtgacccataggacgctctaaagtggacatggtgtgaagagcctattgagctagttagtagtcctccggcccctgaatgcggctaatcctaactgcggagcgcatgccctcgaaccagagggtagtgcgtcgtaacgggcaactctgcagcggaaccgactactttgggtgtccgtgtttctttttattcacttattggctgcttatggtgacaatcaaggaattgttaccatatagctgttggattggccatccggtgtgtaatagagcaattatctatttgtttgttggttacattccattaacatttaagtccctcaatacattacactacattttaaccctaaacgcaagaag

SEQ ID NO: 22914 - DNA, 619 bp, synthetic construct
  source 1..619: mol_type = other DNA
taccgatcaacagcaggcatggcgctccagccatgtctcgatcaagcacttctgtttccccggactgagtatcaatagactgctcacgtggtcgaaggagaaaacgttcgttatccgactaactacttcgagaagcctagtagcaccatcgagactgcggagcgtttcgttcagcactccccccgtgtagatcaggtcgatgagtcactgcataccccacgggcgaccgtggcagtggctgcgttggcggcctgcctatggggtgacccataggacgctctaaagtggacatggtgtgaagagcctattgagctagttagtagtcctccggcccctgaatgcggctaatcctaactgcggagcgcatgccctcgaaccagagggtagtgcgtcgtaacgggcaactctgcagcggaaccgactactttgggtgtccgtgtttctttttattcacttattggctgcttatggtgacaatcaaggaattgttaccatatagctgttggattggccatccggtgtgtaatagagcaattatctatttgtttgttggttacattccattaacatttaagtccctcaatacattacactacattttaaccctaaacgcaagaag

SEQ ID NO: 22915 - DNA, 569 bp, synthetic construct
  source 1..569: mol_type = other DNA
tctgtttccccggactgagtatcaatagactgctcacgtggtcgaaggagaaaacgttcgttatccgactaactacttcgagaagcctagtagcaccatcgagactgcggagcgtttcgttcagcactccccccgtgtagatcaggtcgatgagtcactgcataccccacgggcgaccgtggcagtggctgcgttggcggcctgcctatggggtgacccataggacgctctaaagtggacatggtgtgaagagcctattgagctagttagtagtcctccggcccctgaatgcggctaatcctaactgcggagcgcatgccctcgaaccagagggtagtgcgtcgtaacgggcaactctgcagcggaaccgactactttgggtgtccgtgtttctttttattcacttattggctgcttatggtgacaatcaaggaattgttaccatatagctgttggattggccatccggtgtgtaatagagcaattatctatttgtttgttggttacattccattaacatttaagtccctcaatacattacactacattttaaccctaaacgcaagaag

SEQ ID NO: 22916 - DNA, 519 bp, synthetic construct
  source 1..519: mol_type = other DNA
aaaacgttcgttatccgactaactacttcgagaagcctagtagcaccatcgagactgcggagcgtttcgttcagcactccccccgtgtagatcaggtcgatgagtcactgcataccccacgggcgaccgtggcagtggctgcgttggcggcctgcctatggggtgacccataggacgctctaaagtggacatggtgtgaagagcctattgagctagttagtagtcctccggcccctgaatgcggctaatcctaactgcggagcgcatgccctcgaaccagagggtagtgcgtcgtaacgggcaactctgcagcggaaccgactactttgggtgtccgtgtttctttttattcacttattggctgcttatggtgacaatcaaggaattgttaccatatagctgttggattggccatccggtgtgtaatagagcaattatctatttgtttgttggttacattccattaacatttaagtccctcaatacattacactacattttaaccctaaacgcaagaag

SEQ ID NO: 22917 - DNA, 669 bp, synthetic construct
  source 1..669: mol_type = other DNA
gcctgttttatactcccttccccgtaacttagaagaaccaaaccaagttcaatagaagggggtacaaaccagtaccaccacgaacaagtacttctgtttccccggtgaagttgtatagactgtacccacggttgaaaacgactgatccgttatccgctttcatacttcgagaagcctagtatcatcttggaatcttcgatgcgttgcgctcaacactcaaccccagagtgtagcttaggctgatgagtctggacgtccctcaccggcgacggtggtccaggctgcgttggcggcctacctgtggcccaaagcctcaggacgctagttgtgaacaaggtgtgaagagcctattgagctatgaaagagtcctccggcccctgaatgcggctaatcccaaccacggagcgagagtgtgcaaaccagcgcatttatcgtcgtaacgcgcaagtctgtggcggaaccgactactttgggtgtccgtgtttccttttatttttctacattggctgcttatggtgacaatcatagattgttatcataaagcgaattggattggccatccggtgaaagtgaaacatattattcacctccttgttggatttactccaatcaacctctccacttataagattatcatcacagtcttaccaaatagaagcatattcaaca

SEQ ID NO: 22918 - DNA, 619 bp, synthetic construct
  source 1..619: mol_type = other DNA
aatagaagggggtacaaaccagtaccaccacgaacaagtacttctgtttccccggtgaagttgtatagactgtacccacggttgaaaacgactgatccgttatccgctttcatacttcgagaagcctagtatcatcttggaatcttcgatgcgttgcgctcaacactcaaccccagagtgtagcttaggctgatgagtctggacgtccctcaccggcgacggtggtccaggctgcgttggcggcctacctgtggcccaaagcctcaggacgctagttgtgaacaaggtgtgaagagcctattgagctatgaaagagtcctccggcccctgaatgcggctaatcccaaccacggagcgagagtgtgcaaaccagcgcatttatcgtcgtaacgcgcaagtctgtggcggaaccgactactttgggtgtccgtgtttccttttatttttctacattggctgcttatggtgacaatcatagattgttatcataaagcgaattggattggccatccggtgaaagtgaaacatattattcacctccttgttggatttactccaatcaacctctccacttataagattatcatcacagtcttaccaaatagaagcatattcaaca

SEQ ID NO: 22919 - DNA, 569 bp, synthetic construct
  source 1..569: mol_type = other DNA
cccggtgaagttgtatagactgtacccacggttgaaaacgactgatccgttatccgctttcatacttcgagaagcctagtatcatcttggaatcttcgatgcgttgcgctcaacactcaaccccagagtgtagcttaggctgatgagtctggacgtccctcaccggcgacggtggtccaggctgcgttggcggcctacctgtggcccaaagcctcaggacgctagttgtgaacaaggtgtgaagagcctattgagctatgaaagagtcctccggcccctgaatgcggctaatcccaaccacggagcgagagtgtgcaaaccagcgcatttatcgtcgtaacgcgcaagtctgtggcggaaccgactactttgggtgtccgtgtttccttttatttttctacattggctgcttatggtgacaatcatagattgttatcataaagcgaattggattggccatccggtgaaagtgaaacatattattcacctccttgttggatttactccaatcaacctctccacttataagattatcatcacagtcttaccaaatagaagcatattcaaca

SEQ ID NO: 22920 - DNA, 519 bp, synthetic construct
  source 1..519: mol_type = other DNA
tatccgctttcatacttcgagaagcctagtatcatcttggaatcttcgatgcgttgcgctcaacactcaaccccagagtgtagcttaggctgatgagtctggacgtccctcaccggcgacggtggtccaggctgcgttggcggcctacctgtggcccaaagcctcaggacgctagttgtgaacaaggtgtgaagagcctattgagctatgaaagagtcctccggcccctgaatgcggctaatcccaaccacggagcgagagtgtgcaaaccagcgcatttatcgtcgtaacgcgcaagtctgtggcggaaccgactactttgggtgtccgtgtttccttttatttttctacattggctgcttatggtgacaatcatagattgttatcataaagcgaattggattggccatccggtgaaagtgaaacatattattcacctccttgttggatttactccaatcaacctctccacttataagattatcatcacagtcttaccaaatagaagcatattcaaca

SEQ ID NO: 22921 - DNA, 671 bp, synthetic construct
  source 1..671: mol_type = other DNA
gtgcgcctgttttatacccctccccaaatgagtaacttagaagtttaatatgttcatgaccaatagcaggcgtgacacaccagtcacgtcttggtcaagcactcctgtttccccggactgagtatcaataagctgctcacgcggctgaaagagaaaacgttcgttacccggctaactacttcgagaaacctagtaacaccatgaaagttgcagagtgtttcgttcagcacttcccccgtgtagatcaggtcgatgagtcactgcaaaccccacgggtgaccgtggcagtggctgcgttggcggcctgcccatggggtaacccatgggacgctctaatacagacatggtgcgaagagtctattgagctagttagtagtcctccggcccctgaatgcggctaatcctaactgcggagcacataccctcaatccagagggcagtgtgtcgtaacgggcaactctgcagcggaaccgactactttgggtgtccgtgtttccttttatctcattatggctgcttatggtgacaattgaagaattgttaccatatagctattggattggccatccggtgtctaacagagcaattgtatttctatttgttggatttgttcctttgtcgcacacatctctcaatactttatactacattataaagttaaatacaggaag

SEQ ID NO: 22922 - DNA, 621 bp, synthetic construct
  source 1..621: mol_type = other DNA
tgttcatgaccaatagcaggcgtgacacaccagtcacgtcttggtcaagcactcctgtttccccggactgagtatcaataagctgctcacgcggctgaaagagaaaacgttcgttacccggctaactacttcgagaaacctagtaacaccatgaaagttgcagagtgtttcgttcagcacttcccccgtgtagatcaggtcgatgagtcactgcaaaccccacgggtgaccgtggcagtggctgcgttggcggcctgcccatggggtaacccatgggacgctctaatacagacatggtgcgaagagtctattgagctagttagtagtcctccggcccctgaatgcggctaatcctaactgcggagcacataccctcaatccagagggcagtgtgtcgtaacgggcaactctgcagcggaaccgactactttgggtgtccgtgtttccttttatctcattatggctgcttatggtgacaattgaagaattgttaccatatagctattggattggccatccggtgtctaacagagcaattgtatttctatttgttggatttgttcctttgtcgcacacatctctcaatactttatactacattataaagttaaatacaggaag

SEQ ID NO: 22923 - DNA, 571 bp, synthetic construct
  source 1..571: mol_type = other DNA
actcctgtttccccggactgagtatcaataagctgctcacgcggctgaaagagaaaacgttcgttacccggctaactacttcgagaaacctagtaacaccatgaaagttgcagagtgtttcgttcagcacttcccccgtgtagatcaggtcgatgagtcactgcaaaccccacgggtgaccgtggcagtggctgcgttggcggcctgcccatggggtaacccatgggacgctctaatacagacatggtgcgaagagtctattgagctagttagtagtcctccggcccctgaatgcggctaatcctaactgcggagcacataccctcaatccagagggcagtgtgtcgtaacgggcaactctgcagcggaaccgactactttgggtgtccgtgtttccttttatctcattatggctgcttatggtgacaattgaagaattgttaccatatagctattggattggccatccggtgtctaacagagcaattgtatttctatttgttggatttgttcctttgtcgcacacatctctcaatactttatactacattataaagttaaatacaggaag

SEQ ID NO: 22924 - DNA, 521 bp, synthetic construct
  source 1..521: mol_type = other DNA
gagaaaacgttcgttacccggctaactacttcgagaaacctagtaacaccatgaaagttgcagagtgtttcgttcagcacttcccccgtgtagatcaggtcgatgagtcactgcaaaccccacgggtgaccgtggcagtggctgcgttggcggcctgcccatggggtaacccatgggacgctctaatacagacatggtgcgaagagtctattgagctagttagtagtcctccggcccctgaatgcggctaatcctaactgcggagcacataccctcaatccagagggcagtgtgtcgtaacgggcaactctgcagcggaaccgactactttgggtgtccgtgtttccttttatctcattatggctgcttatggtgacaattgaagaattgttaccatatagctattggattggccatccggtgtctaacagagcaattgtatttctatttgttggatttgttcctttgtcgcacacatctctcaatactttatactacattataaagttaaatacaggaag

SEQ ID NO: 22925 - DNA, 671 bp, synthetic construct
  source 1..671: mol_type = other DNA
tgtgcgcctgttttatttaccctcccccaactgaaaattagaagccaaactcaaacggtcaataggaaacccagtgaaccaactgggctgcgaccaagcacttctgttaccccggactgagtatcaataggctgctcgcgcggctgaaggagaaaacgttcgttacccggccaattacttcgagaaacctagtaccaccatgaaagttgcgaaacgtttcactccgcacaaccccagtgtagatcgggtcgatgagtcaccgcattccccacgggtgaccgtggcggtggctgcgttggcggcccgcccatggggcaacccatgggacgcttcaatactgacatggtgtgaagagtctattgagctaattggtagtcctccggcccctgaatgcggctaatcctaactgcggatcagacacccacacgccagtgggcagtctgtcgtaatgggcaactctgcagcggaaccgactactttgggtgtccgtgtttctttttatccttatactggctgcttatggtgacaattgaaagattgttaccatatagctattggattggccatccggtatctaacagagctattatttacttatttgttggtttcgtacctctcagtatcagagttttgagaacacttaacttcatactactgctaaacactgcaag

SEQ ID NO: 22926 - DNA, 621 bp, synthetic construct
  source 1..621: mol_type = other DNA
tcaaacggtcaataggaaacccagtgaaccaactgggctgcgaccaagcacttctgttaccccggactgagtatcaataggctgctcgcgcggctgaaggagaaaacgttcgttacccggccaattacttcgagaaacctagtaccaccatgaaagttgcgaaacgtttcactccgcacaaccccagtgtagatcgggtcgatgagtcaccgcattccccacgggtgaccgtggcggtggctgcgttggcggcccgcccatggggcaacccatgggacgcttcaatactgacatggtgtgaagagtctattgagctaattggtagtcctccggcccctgaatgcggctaatcctaactgcggatcagacacccacacgccagtgggcagtctgtcgtaatgggcaactctgcagcggaaccgactactttgggtgtccgtgtttctttttatccttatactggctgcttatggtgacaattgaaagattgttaccatatagctattggattggccatccggtatctaacagagctattatttacttatttgttggtttcgtacctctcagtatcagagttttgagaacacttaacttcatactactgctaaacactgcaag

SEQ ID NO: 22927 - DNA, 571 bp, synthetic construct
  source 1..571: mol_type = other DNA
cttctgttaccccggactgagtatcaataggctgctcgcgcggctgaaggagaaaacgttcgttacccggccaattacttcgagaaacctagtaccaccatgaaagttgcgaaacgtttcactccgcacaaccccagtgtagatcgggtcgatgagtcaccgcattccccacgggtgaccgtggcggtggctgcgttggcggcccgcccatggggcaacccatgggacgcttcaatactgacatggtgtgaagagtctattgagctaattggtagtcctccggcccctgaatgcggctaatcctaactgcggatcagacacccacacgccagtgggcagtctgtcgtaatgggcaactctgcagcggaaccgactactttgggtgtccgtgtttctttttatccttatactggctgcttatggtgacaattgaaagattgttaccatatagctattggattggccatccggtatctaacagagctattatttacttatttgttggtttcgtacctctcagtatcagagttttgagaacacttaacttcatactactgctaaacactgcaag

SEQ ID NO: 22928 - DNA, 521 bp, synthetic construct
  source 1..521: mol_type = other DNA
agaaaacgttcgttacccggccaattacttcgagaaacctagtaccaccatgaaagttgcgaaacgtttcactccgcacaaccccagtgtagatcgggtcgatgagtcaccgcattccccacgggtgaccgtggcggtggctgcgttggcggcccgcccatggggcaacccatgggacgcttcaatactgacatggtgtgaagagtctattgagctaattggtagtcctccggcccctgaatgcggctaatcctaactgcggatcagacacccacacgccagtgggcagtctgtcgtaatgggcaactctgcagcggaaccgactactttgggtgtccgtgtttctttttatccttatactggctgcttatggtgacaattgaaagattgttaccatatagctattggattggccatccggtatctaacagagctattatttacttatttgttggtttcgtacctctcagtatcagagttttgagaacacttaacttcatactactgctaaacactgcaag

SEQ ID NO: 22929 - DNA, 672 bp, synthetic construct
  source 1..672: mol_type = other DNA
acttggtattccggtacctttgtacacctatttacaaaccctaccccttgtaaccttagaagcaattatttaaccgctcactagggggtgtgctatccaagcacatcaagagcaagcacttctgtctccccgggaggggctaatggtacgctgtgcccacggcggaaatgagccctaccgttaaccggcagtctacttcgggaagcccagtaactacattgaaactttgaggcgttacactcagcacataaccccaatgtgtagttctggtcgatgagccttggcatcccccacaggcgactgtggccaaggctgcgttggcggccagcctgcggaccaaaagtccgtaggacgcctaattgtggacatggtgtgaagagcctactgagctagactgtagtcctccggcccctgaatgcggctaatcctaaccctggagcatccgcgtgcaacccagtacgtagggtgtcgtaatgcgtaagtctgggatggaaccgactactttgggtgtccgtgtttcttgtttttcatactgggtcgcttatggttacaactaattgttgtaatcattggcagtgcgcgctgaccacgcgattattgatatttccatttgttggatactccaatagtgtcaactcatatacacaacttttaccactgatcaagataaaa

SEQ ID NO: 22930 - DNA, 622 bp, synthetic construct
  source 1..622: mol_type = other DNA
taaccttagaagcaattatttaaccgctcactagggggtgtgctatccaagcacatcaagagcaagcacttctgtctccccgggaggggctaatggtacgctgtgcccacggcggaaatgagccctaccgttaaccggcagtctacttcgggaagcccagtaactacattgaaactttgaggcgttacactcagcacataaccccaatgtgtagttctggtcgatgagccttggcatcccccacaggcgactgtggccaaggctgcgttggcggccagcctgcggaccaaaagtccgtaggacgcctaattgtggacatggtgtgaagagcctactgagctagactgtagtcctccggcccctgaatgcggctaatcctaaccctggagcatccgcgtgcaacccagtacgtagggtgtcgtaatgcgtaagtctgggatggaaccgactactttgggtgtccgtgtttcttgtttttcatactgggtcgcttatggttacaactaattgttgtaatcattggcagtgcgcgctgaccacgcgattattgatatttccatttgttggatactccaatagtgtcaactcatatacacaacttttaccactgatcaagataaaa

SEQ ID NO: 22931 - DNA, 572 bp, synthetic construct
  source 1..572: mol_type = other DNA
gcacatcaagagcaagcacttctgtctccccgggaggggctaatggtacgctgtgcccacggcggaaatgagccctaccgttaaccggcagtctacttcgggaagcccagtaactacattgaaactttgaggcgttacactcagcacataaccccaatgtgtagttctggtcgatgagccttggcatcccccacaggcgactgtggccaaggctgcgttggcggccagcctgcggaccaaaagtccgtaggacgcctaattgtggacatggtgtgaagagcctactgagctagactgtagtcctccggcccctgaatgcggctaatcctaaccctggagcatccgcgtgcaacccagtacgtagggtgtcgtaatgcgtaagtctgggatggaaccgactactttgggtgtccgtgtttcttgtttttcatactgggtcgcttatggttacaactaattgttgtaatcattggcagtgcgcgctgaccacgcgattattgatatttccatttgttggatactccaatagtgtcaactcatatacacaacttttaccactgatcaagataaaa

SEQ ID NO: 22932 - DNA, 522 bp, synthetic construct
  source 1..522: mol_type = other DNA
ctgtgcccacggcggaaatgagccctaccgttaaccggcagtctacttcgggaagcccagtaactacattgaaactttgaggcgttacactcagcacataaccccaatgtgtagttctggtcgatgagccttggcatcccccacaggcgactgtggccaaggctgcgttggcggccagcctgcggaccaaaagtccgtaggacgcctaattgtggacatggtgtgaagagcctactgagctagactgtagtcctccggcccctgaatgcggctaatcctaaccctggagcatccgcgtgcaacccagtacgtagggtgtcgtaatgcgtaagtctgggatggaaccgactactttgggtgtccgtgtttcttgtttttcatactgggtcgcttatggttacaactaattgttgtaatcattggcagtgcgcgctgaccacgcgattattgatatttccatttgttggatactccaatagtgtcaactcatatacacaacttttaccactgatcaagataaaa

SEQ ID NO: 22933 - DNA, 673 bp, synthetic construct
  source 1..673: mol_type = other DNA
gtgcgcctgttttatccccccaaacccccgtaacactacactagaagatagacaatgcgaccaatagccagtggggcaacccagcctcaccttggtcaagcacctctgttttcccgggcttagtaccaataagctgctcgcgtggctgaaggggaacgcgctcgttatccggctaactacttcgagaaacctagtatcaccatggaagttgcagagtgtttcgatcagcacaaccccagtgtagatcaggccgatgagtcaccgtgtaccccacgggcgaccgtgacggtggctgcgttggcggcctgcccatggagtacaccatgggacgctctaatacagacatggtgcgaagagtctattgagctagttagtagtcctccggcccctgaatgcggctaatcctaactgcggagcacgcgctctcaacccagagagtagcgtgtcgtaacgggcaactctgcagcggaaccgactactttgggtgtccgtgtttctctttattcttacattggctgcttatggtgacaattgaaagattgttaccatatagctattggattggccatccggtgtgcaacagagctatcatatattcttttgttggctttgtgccactagattatactgcaattattactttaaggtatatcttgcttttgaacacagcaaa

SEQ ID NO: 22934 - DNA, 623 bp, synthetic construct
  source 1..623: mol_type = other DNA
gacaatgcgaccaatagccagtggggcaacccagcctcaccttggtcaagcacctctgttttcccgggcttagtaccaataagctgctcgcgtggctgaaggggaacgcgctcgttatccggctaactacttcgagaaacctagtatcaccatggaagttgcagagtgtttcgatcagcacaaccccagtgtagatcaggccgatgagtcaccgtgtaccccacgggcgaccgtgacggtggctgcgttggcggcctgcccatggagtacaccatgggacgctctaatacagacatggtgcgaagagtctattgagctagttagtagtcctccggcccctgaatgcggctaatcctaactgcggagcacgcgctctcaacccagagagtagcgtgtcgtaacgggcaactctgcagcggaaccgactactttgggtgtccgtgtttctctttattcttacattggctgcttatggtgacaattgaaagattgttaccatatagctattggattggccatccggtgtgcaacagagctatcatatattcttttgttggctttgtgccactagattatactgcaattattactttaaggtatatcttgcttttgaacacagcaaa

SEQ ID NO: 22935 - DNA, 573 bp, synthetic construct
  source 1..573: mol_type = other DNA
cacctctgttttcccgggcttagtaccaataagctgctcgcgtggctgaaggggaacgcgctcgttatccggctaactacttcgagaaacctagtatcaccatggaagttgcagagtgtttcgatcagcacaaccccagtgtagatcaggccgatgagtcaccgtgtaccccacgggcgaccgtgacggtggctgcgttggcggcctgcccatggagtacaccatgggacgctctaatacagacatggtgcgaagagtctattgagctagttagtagtcctccggcccctgaatgcggctaatcctaactgcggagcacgcgctctcaacccagagagtagcgtgtcgtaacgggcaactctgcagcggaaccgactactttgggtgtccgtgtttctctttattcttacattggctgcttatggtgacaattgaaagattgttaccatatagctattggattggccatccggtgtgcaacagagctatcatatattcttttgttggctttgtgccactagattatactgcaattattactttaaggtatatcttgcttttgaacacagcaaa

SEQ ID NO: 22936 - DNA, 523 bp, synthetic construct
  source 1..523: mol_type = other DNA
ggggaacgcgctcgttatccggctaactacttcgagaaacctagtatcaccatggaagttgcagagtgtttcgatcagcacaaccccagtgtagatcaggccgatgagtcaccgtgtaccccacgggcgaccgtgacggtggctgcgttggcggcctgcccatggagtacaccatgggacgctctaatacagacatggtgcgaagagtctattgagctagttagtagtcctccggcccctgaatgcggctaatcctaactgcggagcacgcgctctcaacccagagagtagcgtgtcgtaacgggcaactctgcagcggaaccgactactttgggtgtccgtgtttctctttattcttacattggctgcttatggtgacaattgaaagattgttaccatatagctattggattggccatccggtgtgcaacagagctatcatatattcttttgttggctttgtgccactagattatactgcaattattactttaaggtatatcttgcttttgaacacagcaaa

SEQ ID NO: 22937 - DNA, 673 bp, synthetic construct
  source 1..673: mol_type = other DNA
acctttgtgcgcctgttttatccaccctccccaacgtaacttagaagcttatttaaaccgaccaacagacggtccagcataccagctgggttacggtcaagcacttctgttaccccggactgagtatcaataggccgctcgcgcggctgaaggagaaaacgttcgttacccggccaattacttcgagaaacctagtaccaccgtggaggtcgcgaagtgtttcgctccgcacaaccccagtgtagatcaggtcgatgagtcaccgcattccccactggcgacagtggcggtggctgcgtggcggcctgcccatggggtaacccatgggacgcttcaatactgacacggtgtgaagagtctattgagctaattggtagtcctccggcccctgaatgcggctaatcctaactgcggagcagatatccacgagccagtggacagtctgtcgtaatgggtaactctgcagcggaaccgactactttgggtgtccgtgtttccatttattcctatactggctgcttatggtgacaattgagagattgttaccatatagctattggattggccatccggtgacaaacagagcaattatatatctctttgttggttatattccactcaacattaaggttttaagaacgcttaattacatcctattgttaaacacattaag

SEQ ID NO: 22938 - DNA, 623 bp, synthetic construct
  source 1..623: mol_type = other DNA
atttaaaccgaccaacagacggtccagcataccagctgggttacggtcaagcacttctgttaccccggactgagtatcaataggccgctcgcgcggctgaaggagaaaacgttcgttacccggccaattacttcgagaaacctagtaccaccgtggaggtcgcgaagtgtttcgctccgcacaaccccagtgtagatcaggtcgatgagtcaccgcattccccactggcgacagtggcggtggctgcgtggcggcctgcccatggggtaacccatgggacgcttcaatactgacacggtgtgaagagtctattgagctaattggtagtcctccggcccctgaatgcggctaatcctaactgcggagcagatatccacgagccagtggacagtctgtcgtaatgggtaactctgcagcggaaccgactactttgggtgtccgtgtttccatttattcctatactggctgcttatggtgacaattgagagattgttaccatatagctattggattggccatccggtgacaaacagagcaattatatatctctttgttggttatattccactcaacattaaggttttaagaacgcttaattacatcctattgttaaacacattaag

SEQ ID NO: 22939 - DNA, 573 bp, synthetic construct
  source 1..573: mol_type = other DNA
gcacttctgttaccccggactgagtatcaataggccgctcgcgcggctgaaggagaaaacgttcgttacccggccaattacttcgagaaacctagtaccaccgtggaggtcgcgaagtgtttcgctccgcacaaccccagtgtagatcaggtcgatgagtcaccgcattccccactggcgacagtggcggtggctgcgtggcggcctgcccatggggtaacccatgggacgcttcaatactgacacggtgtgaagagtctattgagctaattggtagtcctccggcccctgaatgcggctaatcctaactgcggagcagatatccacgagccagtggacagtctgtcgtaatgggtaactctgcagcggaaccgactactttgggtgtccgtgtttccatttattcctatactggctgcttatggtgacaattgagagattgttaccatatagctattggattggccatccggtgacaaacagagcaattatatatctctttgttggttatattccactcaacattaaggttttaagaacgcttaattacatcctattgttaaacacattaag

SEQ ID NO: 22940 - DNA, 523 bp, synthetic construct
  source 1..523: mol_type = other DNA
aggagaaaacgttcgttacccggccaattacttcgagaaacctagtaccaccgtggaggtcgcgaagtgtttcgctccgcacaaccccagtgtagatcaggtcgatgagtcaccgcattccccactggcgacagtggcggtggctgcgtggcggcctgcccatggggtaacccatgggacgcttcaatactgacacggtgtgaagagtctattgagctaattggtagtcctccggcccctgaatgcggctaatcctaactgcggagcagatatccacgagccagtggacagtctgtcgtaatgggtaactctgcagcggaaccgactactttgggtgtccgtgtttccatttattcctatactggctgcttatggtgacaattgagagattgttaccatatagctattggattggccatccggtgacaaacagagcaattatatatctctttgttggttatattccactcaacattaaggttttaagaacgcttaattacatcctattgttaaacacattaag

SEQ ID NO: 22941 - DNA, 673 bp, synthetic construct
  source 1..673: mol_type = other DNA
tttgtgcgcctgttttataccccctcctccaaccgtaacctagaagcagcaccatatggccaatagtagacgtggcgcaccagccacgttttggtcaagcacttctgtttccccgggccgagtatcaataggctgctcacgcggctgaaggagaaagcgtccgttacccggccaattacttcgagaaacctagtaccaccatggaagttgcgcggcgtttcgctccacacaaccccagtgtagatcgggtcgatgagtcaccgcatttccccacgggtgaccgtggcggtggctgcgttggcggcctgcccatgaggaaactcatgggacgcttcaatactgacatggtgtgaagagtctattgagctaattggtagtcctccggcccctgaatgcggctaatcctaactgcggagcagatgctcacaaaccagtgggtggtctgtcgtaatgggcaactctgcagcggaaccgactactttgggtgtccgtgtttccttttattttcacactggctgcttatggtgacaattgaaggattgttaccatatagctattggattggccatccggtgacaaacagagcgattgtctatctatttgttggttttgtaccattagatttcaaagtcctgaaaaccctcaatttcgtcttaacactcaattcggcaag

SEQ ID NO: 22942 - DNA, 623 bp, synthetic construct
  source 1..623: mol_type = other DNA
accatatggccaatagtagacgtggcgcaccagccacgttttggtcaagcacttctgtttccccgggccgagtatcaataggctgctcacgcggctgaaggagaaagcgtccgttacccggccaattacttcgagaaacctagtaccaccatggaagttgcgcggcgtttcgctccacacaaccccagtgtagatcgggtcgatgagtcaccgcatttccccacgggtgaccgtggcggtggctgcgttggcggcctgcccatgaggaaactcatgggacgcttcaatactgacatggtgtgaagagtctattgagctaattggtagtcctccggcccctgaatgcggctaatcctaactgcggagcagatgctcacaaaccagtgggtggtctgtcgtaatgggcaactctgcagcggaaccgactactttgggtgtccgtgtttccttttattttcacactggctgcttatggtgacaattgaaggattgttaccatatagctattggattggccatccggtgacaaacagagcgattgtctatctatttgttggttttgtaccattagatttcaaagtcctgaaaaccctcaatttcgtcttaacactcaattcggcaag

SEQ ID NO: 22943 - DNA, 573 bp, synthetic construct
  source 1..573: mol_type = other DNA
acttctgtttccccgggccgagtatcaataggctgctcacgcggctgaaggagaaagcgtccgttacccggccaattacttcgagaaacctagtaccaccatggaagttgcgcggcgtttcgctccacacaaccccagtgtagatcgggtcgatgagtcaccgcatttccccacgggtgaccgtggcggtggctgcgttggcggcctgcccatgaggaaactcatgggacgcttcaatactgacatggtgtgaagagtctattgagctaattggtagtcctccggcccctgaatgcggctaatcctaactgcggagcagatgctcacaaaccagtgggtggtctgtcgtaatgggcaactctgcagcggaaccgactactttgggtgtccgtgtttccttttattttcacactggctgcttatggtgacaattgaaggattgttaccatatagctattggattggccatccggtgacaaacagagcgattgtctatctatttgttggttttgtaccattagatttcaaagtcctgaaaaccctcaatttcgtcttaacactcaattcggcaag

SEQ ID NO: 22944 - DNA, 523 bp, synthetic construct
  source 1..523: mol_type = other DNA
gagaaagcgtccgttacccggccaattacttcgagaaacctagtaccaccatggaagttgcgcggcgtttcgctccacacaaccccagtgtagatcgggtcgatgagtcaccgcatttccccacgggtgaccgtggcggtggctgcgttggcggcctgcccatgaggaaactcatgggacgcttcaatactgacatggtgtgaagagtctattgagctaattggtagtcctccggcccctgaatgcggctaatcctaactgcggagcagatgctcacaaaccagtgggtggtctgtcgtaatgggcaactctgcagcggaaccgactactttgggtgtccgtgtttccttttattttcacactggctgcttatggtgacaattgaaggattgttaccatatagctattggattggccatccggtgacaaacagagcgattgtctatctatttgttggttttgtaccattagatttcaaagtcctgaaaaccctcaatttcgtcttaacactcaattcggcaag

SEQ ID NO: 22945 - DNA, 673 bp, synthetic construct
  source 1..673: mol_type = other DNA
cctttgtgcgcctgttttatctaccccccccaacgcaactcagaagctcaactgaaccgaccaatagatgacccggcaagccagcagggccctggtcaagcacttctgttaccccggactgagtatcaataagctgctcgcgcggctaaaggagaaaacgttcgttacccggccaattacttcgagaaacccagtaccaccgtgaaagttgcgcagtgtttcgctccgcacaaccccagtgtagatcaggccgatgagtcaccgcattccccactggtgacagtggcggtggctgcgttggcggcctgcccatggggcaacccatgggacgcttcaatactgacacggtgcgaagagtctattgagctaattggtagacctccggcccctgaatgcggctaatcctaactgcggagcagatacccacgcgccagtgggcagtctgtcgtaatgggcaactctgcagcggaaccgactactttgggtgtccgtgtttccttttattcttatactggctgcttatggtgacaattgaaagattgttgccatatagctattggattggccatccagtgactaacaaagcaattgtctatctatttgttggttttataccattaaactacaaagctataagcacactcaaatttatattggtactcaactcagcaaa

SEQ ID NO: 22946 - DNA, 623 bp, synthetic construct
  source 1..623: mol_type = other DNA
actgaaccgaccaatagatgacccggcaagccagcagggccctggtcaagcacttctgttaccccggactgagtatcaataagctgctcgcgcggctaaaggagaaaacgttcgttacccggccaattacttcgagaaacccagtaccaccgtgaaagttgcgcagtgtttcgctccgcacaaccccagtgtagatcaggccgatgagtcaccgcattccccactggtgacagtggcggtggctgcgttggcggcctgcccatggggcaacccatgggacgcttcaatactgacacggtgcgaagagtctattgagctaattggtagacctccggcccctgaatgcggctaatcctaactgcggagcagatacccacgcgccagtgggcagtctgtcgtaatgggcaactctgcagcggaaccgactactttgggtgtccgtgtttccttttattcttatactggctgcttatggtgacaattgaaagattgttgccatatagctattggattggccatccagtgactaacaaagcaattgtctatctatttgttggttttataccattaaactacaaagctataagcacactcaaatttatattggtactcaactcagcaaa

SEQ ID NO: 22947 - DNA, 573 bp, synthetic construct
  source 1..573: mol_type = other DNA
cacttctgttaccccggactgagtatcaataagctgctcgcgcggctaaaggagaaaacgttcgttacccggccaattacttcgagaaacccagtaccaccgtgaaagttgcgcagtgtttcgctccgcacaaccccagtgtagatcaggccgatgagtcaccgcattccccactggtgacagtggcggtggctgcgttggcggcctgcccatggggcaacccatgggacgcttcaatactgacacggtgcgaagagtctattgagctaattggtagacctccggcccctgaatgcggctaatcctaactgcggagcagatacccacgcgccagtgggcagtctgtcgtaatgggcaactctgcagcggaaccgactactttgggtgtccgtgtttccttttattcttatactggctgcttatggtgacaattgaaagattgttgccatatagctattggattggccatccagtgactaacaaagcaattgtctatctatttgttggttttataccattaaactacaaagctataagcacactcaaatttatattggtactcaactcagcaaa

SEQ ID NO: 22948 - DNA, 523 bp, synthetic construct
  source 1..523: mol_type = other DNA
ggagaaaacgttcgttacccggccaattacttcgagaaacccagtaccaccgtgaaagttgcgcagtgtttcgctccgcacaaccccagtgtagatcaggccgatgagtcaccgcattccccactggtgacagtggcggtggctgcgttggcggcctgcccatggggcaacccatgggacgcttcaatactgacacggtgcgaagagtctattgagctaattggtagacctccggcccctgaatgcggctaatcctaactgcggagcagatacccacgcgccagtgggcagtctgtcgtaatgggcaactctgcagcggaaccgactactttgggtgtccgtgtttccttttattcttatactggctgcttatggtgacaattgaaagattgttgccatatagctattggattggccatccagtgactaacaaagcaattgtctatctatttgttggttttataccattaaactacaaagctataagcacactcaaatttatattggtactcaactcagcaaa

SEQ ID NO: 22949 - DNA, 674 bp, synthetic construct
  source 1..674: mol_type = other DNA
gtgcgcctgttttataaccccttccccaaatttgcaatttagaagcaaagcacactaacgatcaacagcaggcgtggcataccagctacgtcacgatcaagcacttctgtttccccggactgagtatcaataagctgcttgcgcggctgaaggagaaaatgtccgttatccggctaactacttcgagaaacctagtagcaccattgaagctgcagagtgtttcgctcggcacttcccccgtgtagatcaggtcgatgagtcactgcactccccacgggcgaccgtggcagtggctgcgttggcggcctgcctatggggcaacccataggacgctctaatgtggacatggtgtgaagagtctattgagctagttagtagtcctccggcccctgaatgcggctaatcctaactgcggagcgcatgcccccaaaccagggggaggtgcgtcgtaatgggcaactctgcagcggaaccgactactttgggtgtccgtgtttccttttatctttatattggctgcttatggtgacaattgagagattgttaccatatagctattggattggccatccggtgagcaatagagcaattatttattcctttattggatttgtaccgttgaattatactgcttttattacactgaaacacatcctattgttgaacacaataaa

SEQ ID NO: 22950 - DNA, 624 bp, synthetic construct
  source 1..624: mol_type = other DNA
cacactaacgatcaacagcaggcgtggcataccagctacgtcacgatcaagcacttctgtttccccggactgagtatcaataagctgcttgcgcggctgaaggagaaaatgtccgttatccggctaactacttcgagaaacctagtagcaccattgaagctgcagagtgtttcgctcggcacttcccccgtgtagatcaggtcgatgagtcactgcactccccacgggcgaccgtggcagtggctgcgttggcggcctgcctatggggcaacccataggacgctctaatgtggacatggtgtgaagagtctattgagctagttagtagtcctccggcccctgaatgcggctaatcctaactgcggagcgcatgcccccaaaccagggggaggtgcgtcgtaatgggcaactctgcagcggaaccgactactttgggtgtccgtgtttccttttatctttatattggctgcttatggtgacaattgagagattgttaccatatagctattggattggccatccggtgagcaatagagcaattatttattcctttattggatttgtaccgttgaattatactgcttttattacactgaaacacatcctattgttgaacacaataaa

SEQ ID NO: 22951 - DNA, 574 bp, synthetic construct
  source 1..574: mol_type = other DNA
gcacttctgtttccccggactgagtatcaataagctgcttgcgcggctgaaggagaaaatgtccgttatccggctaactacttcgagaaacctagtagcaccattgaagctgcagagtgtttcgctcggcacttcccccgtgtagatcaggtcgatgagtcactgcactccccacgggcgaccgtggcagtggctgcgttggcggcctgcctatggggcaacccataggacgctctaatgtggacatggtgtgaagagtctattgagctagttagtagtcctccggcccctgaatgcggctaatcctaactgcggagcgcatgcccccaaaccagggggaggtgcgtcgtaatgggcaactctgcagcggaaccgactactttgggtgtccgtgtttccttttatctttatattggctgcttatggtgacaattgagagattgttaccatatagctattggattggccatccggtgagcaatagagcaattatttattcctttattggatttgtaccgttgaattatactgcttttattacactgaaacacatcctattgttgaacacaataaa

SEQ ID NO: 22952 - DNA, 524 bp, synthetic construct
  source 1..524: mol_type = other DNA
aggagaaaatgtccgttatccggctaactacttcgagaaacctagtagcaccattgaagctgcagagtgtttcgctcggcacttcccccgtgtagatcaggtcgatgagtcactgcactccccacgggcgaccgtggcagtggctgcgttggcggcctgcctatggggcaacccataggacgctctaatgtggacatggtgtgaagagtctattgagctagttagtagtcctccggcccctgaatgcggctaatcctaactgcggagcgcatgcccccaaaccagggggaggtgcgtcgtaatgggcaactctgcagcggaaccgactactttgggtgtccgtgtttccttttatctttatattggctgcttatggtgacaattgagagattgttaccatatagctattggattggccatccggtgagcaatagagcaattatttattcctttattggatttgtaccgttgaattatactgcttttattacactgaaacacatcctattgttgaacacaataaa

SEQ ID NO: 22953 - DNA, 674 bp, synthetic construct
  source 1..674: mol_type = other DNA
acggtacccttgtacgcctgttttatactcccttccccgtaacttagaagtaacaaacctatgttcaatagaagggggtacaaaccagtaccaccacgaacaagcacttctgtttccccggtgagatcacatagactgttcccacggttgaaagtgatcgatccgttatccgctcttgtacttcgagaagcctagtattatcttgggaccaacgatgcgttgcgatcagcactcgaccccagagtgtagcttaggtcgatgagtctggacattcctcaccggtgacggtggtccaggctgcgttggcggcctacctgtggcccaaagccacaggacgctagttgtgaacaaggtgtgaagagcctattgagctacatgagagtcctccggcccctgaatgcggctaatcctaaccacggagcaggcgattgcaaaccagcaattagcttgtcgtaatgcgtaagtctgtggcggaaccgactactttgggtgtccgtgtttccttttattttatcaatggctgcttatggtgacaatcatagattgttgtcataaagcgaattggattggccatccggtgacgttcagagttatttgtttgtgaaattcattctctcaatcctgtccacatttgacatacttccttaaatctttatacagaacaccttaacaca

SEQ ID NO: 22954 - DNA, 624 bp, synthetic construct
  source 1..624: mol_type = other DNA
taacaaacctatgttcaatagaagggggtacaaaccagtaccaccacgaacaagcacttctgtttccccggtgagatcacatagactgttcccacggttgaaagtgatcgatccgttatccgctcttgtacttcgagaagcctagtattatcttgggaccaacgatgcgttgcgatcagcactcgaccccagagtgtagcttaggtcgatgagtctggacattcctcaccggtgacggtggtccaggctgcgttggcggcctacctgtggcccaaagccacaggacgctagttgtgaacaaggtgtgaagagcctattgagctacatgagagtcctccggcccctgaatgcggctaatcctaaccacggagcaggcgattgcaaaccagcaattagcttgtcgtaatgcgtaagtctgtggcggaaccgactactttgggtgtccgtgtttccttttattttatcaatggctgcttatggtgacaatcatagattgttgtcataaagcgaattggattggccatccggtgacgttcagagttatttgtttgtgaaattcattctctcaatcctgtccacatttgacatacttccttaaatctttatacagaacaccttaacaca

SEQ ID NO: 22955 - DNA, 574 bp, synthetic construct
  source 1..574: mol_type = other DNA
caagcacttctgtttccccggtgagatcacatagactgttcccacggttgaaagtgatcgatccgttatccgctcttgtacttcgagaagcctagtattatcttgggaccaacgatgcgttgcgatcagcactcgaccccagagtgtagcttaggtcgatgagtctggacattcctcaccggtgacggtggtccaggctgcgttggcggcctacctgtggcccaaagccacaggacgctagttgtgaacaaggtgtgaagagcctattgagctacatgagagtcctccggcccctgaatgcggctaatcctaaccacggagcaggcgattgcaaaccagcaattagcttgtcgtaatgcgtaagtctgtggcggaaccgactactttgggtgtccgtgtttccttttattttatcaatggctgcttatggtgacaatcatagattgttgtcataaagcgaattggattggccatccggtgacgttcagagttatttgtttgtgaaattcattctctcaatcctgtccacatttgacatacttccttaaatctttatacagaacaccttaacaca

SEQ ID NO: 22956 - DNA, 524 bp, synthetic construct
  source 1..524: mol_type = other DNA
aaagtgatcgatccgttatccgctcttgtacttcgagaagcctagtattatcttgggaccaacgatgcgttgcgatcagcactcgaccccagagtgtagcttaggtcgatgagtctggacattcctcaccggtgacggtggtccaggctgcgttggcggcctacctgtggcccaaagccacaggacgctagttgtgaacaaggtgtgaagagcctattgagctacatgagagtcctccggcccctgaatgcggctaatcctaaccacggagcaggcgattgcaaaccagcaattagcttgtcgtaatgcgtaagtctgtggcggaaccgactactttgggtgtccgtgtttccttttattttatcaatggctgcttatggtgacaatcatagattgttgtcataaagcgaattggattggccatccggtgacgttcagagttatttgtttgtgaaattcattctctcaatcctgtccacatttgacatacttccttaaatctttatacagaacaccttaacaca

SEQ ID NO: 22957 - DNA, 675 bp, synthetic construct
  source 1..675: mol_type = other DNA
tttgtgcgcctgttttatacctcctccccgaagagtaacttagaagcttaacatacccatggccagcagcaggcgtgacataccagtcatgccccggtcaagcacttctgtctccccggactgagtatcaatagactgctcgcgcggttgaaggagaaaacgttcgttatccggctaactacttcgagaaacctagtaacaccatgaaagttgcagagtgtttcgttcagcacttcccccgtgtagatcaggtcgatgagtcactgcaaaccccacgggcgaccgtggcagtggctgcgttggcggcctgcccatgggaccacccatgggacgctctaatacagacatggtgtgaagagtctattgagctagttagtagtcctccggcccctgaatgcggctaatcctaactgtggagcacacgccctcaacccagggggtagtgtgtcgtaatgggcaactctacagcggaaccgactactttgggtgtccgtgtttccttttatctttatattggctgcttatggtgacaattgaagaattgttaccatatagctattggattggccatccggtgtctaatagagcaattgtatacctatttgttggatttgtccccttgtcatacacatctataaacaccctacaatatattgtaaaattgaatacaggaaa

SEQ ID NO: 22958 - DNA, 625 bp, synthetic construct
  source 1..625: mol_type = other DNA
acatacccatggccagcagcaggcgtgacataccagtcatgccccggtcaagcacttctgtctccccggactgagtatcaatagactgctcgcgcggttgaaggagaaaacgttcgttatccggctaactacttcgagaaacctagtaacaccatgaaagttgcagagtgtttcgttcagcacttcccccgtgtagatcaggtcgatgagtcactgcaaaccccacgggcgaccgtggcagtggctgcgttggcggcctgcccatgggaccacccatgggacgctctaatacagacatggtgtgaagagtctattgagctagttagtagtcctccggcccctgaatgcggctaatcctaactgtggagcacacgccctcaacccagggggtagtgtgtcgtaatgggcaactctacagcggaaccgactactttgggtgtccgtgtttccttttatctttatattggctgcttatggtgacaattgaagaattgttaccatatagctattggattggccatccggtgtctaatagagcaattgtatacctatttgttggatttgtccccttgtcatacacatctataaacaccctacaatatattgtaaaattgaatacaggaaa

SEQ ID NO: 22959 - DNA, 575 bp, synthetic construct
  source 1..575: mol_type = other DNA
agcacttctgtctccccggactgagtatcaatagactgctcgcgcggttgaaggagaaaacgttcgttatccggctaactacttcgagaaacctagtaacaccatgaaagttgcagagtgtttcgttcagcacttcccccgtgtagatcaggtcgatgagtcactgcaaaccccacgggcgaccgtggcagtggctgcgttggcggcctgcccatgggaccacccatgggacgctctaatacagacatggtgtgaagagtctattgagctagttagtagtcctccggcccctgaatgcggctaatcctaactgtggagcacacgccctcaacccagggggtagtgtgtcgtaatgggcaactctacagcggaaccgactactttgggtgtccgtgtttccttttatctttatattggctgcttatggtgacaattgaagaattgttaccatatagctattggattggccatccggtgtctaatagagcaattgtatacctatttgttggatttgtccccttgtcatacacatctataaacaccctacaatatattgtaaaattgaatacaggaaa

SEQ ID NO: 22960 - DNA, 525 bp, synthetic construct
  source 1..525: mol_type = other DNA
aaggagaaaacgttcgttatccggctaactacttcgagaaacctagtaacaccatgaaagttgcagagtgtttcgttcagcacttcccccgtgtagatcaggtcgatgagtcactgcaaaccccacgggcgaccgtggcagtggctgcgttggcggcctgcccatgggaccacccatgggacgctctaatacagacatggtgtgaagagtctattgagctagttagtagtcctccggcccctgaatgcggctaatcctaactgtggagcacacgccctcaacccagggggtagtgtgtcgtaatgggcaactctacagcggaaccgactactttgggtgtccgtgtttccttttatctttatattggctgcttatggtgacaattgaagaattgttaccatatagctattggattggccatccggtgtctaatagagcaattgtatacctatttgttggatttgtccccttgtcatacacatctataaacaccctacaatatattgtaaaattgaatacaggaaa

SEQ ID NO: 22961 - DNA, 675 bp, synthetic construct
  source 1..675: mol_type = other DNA
gtgcgcctgttttatatccctcccccccaaaagtgtaacgtagaagtttaatacactcacgaccaatagcaggcgtgacgcaccagtcacgtcttggtcaagtacttctgtctccccgggccaagtatcaatagactgcttacgcggttgaaggagaaaacgctcgttacccggctaactacttcgagaaacccagtagcaccatgaaagttgcagggtgtttcgttcagcacttcccccgtgtagaccaggtcgatgagtcactgcaaaccccacgggcgaccgtggcagtggctgcgttggcggcctgcccatggggtaacccatgggacgctctaatacagacatggtgtgaagagtctattgagctagttagtagtcctccggcccctgaatgcggctaatcctaactgcggagcacacaccctcaacccagggggcggtgtgtcgtaacgggtaactctgcagcggaaccgactactttgggtgtccgtgtttccttttatatttattatggctgcttatggtgacaattgaagaattgttaccatatagctattggattggccatccggtgtctaacagagcaattgtatacctatttgttggatttgtccctctgtcacacacacctctcaataccctatactatattatagagttgaatacaggaag

SEQ ID NO: 22962 - DNA, 625 bp, synthetic construct
  source 1..625: mol_type = other DNA
atacactcacgaccaatagcaggcgtgacgcaccagtcacgtcttggtcaagtacttctgtctccccgggccaagtatcaatagactgcttacgcggttgaaggagaaaacgctcgttacccggctaactacttcgagaaacccagtagcaccatgaaagttgcagggtgtttcgttcagcacttcccccgtgtagaccaggtcgatgagtcactgcaaaccccacgggcgaccgtggcagtggctgcgttggcggcctgcccatggggtaacccatgggacgctctaatacagacatggtgtgaagagtctattgagctagttagtagtcctccggcccctgaatgcggctaatcctaactgcggagcacacaccctcaacccagggggcggtgtgtcgtaacgggtaactctgcagcggaaccgactactttgggtgtccgtgtttccttttatatttattatggctgcttatggtgacaattgaagaattgttaccatatagctattggattggccatccggtgtctaacagagcaattgtatacctatttgttggatttgtccctctgtcacacacacctctcaataccctatactatattatagagttgaatacaggaag

SEQ ID NO: 22963 - DNA, 575 bp, synthetic construct
  source 1..575: mol_type = other DNA
agtacttctgtctccccgggccaagtatcaatagactgcttacgcggttgaaggagaaaacgctcgttacccggctaactacttcgagaaacccagtagcaccatgaaagttgcagggtgtttcgttcagcacttcccccgtgtagaccaggtcgatgagtcactgcaaaccccacgggcgaccgtggcagtggctgcgttggcggcctgcccatggggtaacccatgggacgctctaatacagacatggtgtgaagagtctattgagctagttagtagtcctccggcccctgaatgcggctaatcctaactgcggagcacacaccctcaacccagggggcggtgtgtcgtaacgggtaactctgcagcggaaccgactactttgggtgtccgtgtttccttttatatttattatggctgcttatggtgacaattgaagaattgttaccatatagctattggattggccatccggtgtctaacagagcaattgtatacctatttgttggatttgtccctctgtcacacacacctctcaataccctatactatattatagagttgaatacaggaag

SEQ ID NO: 22964 - DNA, 525 bp, synthetic construct
  source 1..525: mol_type = other DNA
aaggagaaaacgctcgttacccggctaactacttcgagaaacccagtagcaccatgaaagttgcagggtgtttcgttcagcacttcccccgtgtagaccaggtcgatgagtcactgcaaaccccacgggcgaccgtggcagtggctgcgttggcggcctgcccatggggtaacccatgggacgctctaatacagacatggtgtgaagagtctattgagctagttagtagtcctccggcccctgaatgcggctaatcctaactgcggagcacacaccctcaacccagggggcggtgtgtcgtaacgggtaactctgcagcggaaccgactactttgggtgtccgtgtttccttttatatttattatggctgcttatggtgacaattgaagaattgttaccatatagctattggattggccatccggtgtctaacagagcaattgtatacctatttgttggatttgtccctctgtcacacacacctctcaataccctatactatattatagagttgaatacaggaag

SEQ ID NO: 22965 - DNA, 675 bp, synthetic construct
  source 1..675: mol_type = other DNA
acctttgtgcgcctgttttatcaccctaccccatatgaaacttagaagtaatacatagccgaccaatagcaggtgtggcgtgccagccacatcttggtcaagcacttctgtttccccgggtcgagtatcaataagctgttcacacggctgaaggagaaaacacccgttatccggccaactacttcgagaaacctagtaccaccatgaacgttgcaaggtgtttcgctcagcacttcccccgtgtagatcaggccgatgagtcaccgcataccccacgggtgaccgtggcggtggctgcgttggcggcctgcctatgggttaacccataggacgccttaatactgacatggtgcgaagagtctattgagctagttggtagtcctccggcccctgaatgcggctaatcctaactgcggagcacacactcacaaaccagtgagcggtgtgtcgtaacgggcaactctgcagcggaaccgactactttgggtgtccgtgtttccttttacctttatattggctgcttatggtgacaatcagagaattgttaccatatagctattggattggccatccggtgtctaatagagctattgtatatctgtttgttggattcactccgctgacctacaaatctctaaacaccttgtgctatattttgaatctaaatacacgaaa

SEQ ID NO: 22966 - DNA, 625 bp, synthetic construct
  source 1..625: mol_type = other DNA
atacatagccgaccaatagcaggtgtggcgtgccagccacatcttggtcaagcacttctgtttccccgggtcgagtatcaataagctgttcacacggctgaaggagaaaacacccgttatccggccaactacttcgagaaacctagtaccaccatgaacgttgcaaggtgtttcgctcagcacttcccccgtgtagatcaggccgatgagtcaccgcataccccacgggtgaccgtggcggtggctgcgttggcggcctgcctatgggttaacccataggacgccttaatactgacatggtgcgaagagtctattgagctagttggtagtcctccggcccctgaatgcggctaatcctaactgcggagcacacactcacaaaccagtgagcggtgtgtcgtaacgggcaactctgcagcggaaccgactactttgggtgtccgtgtttccttttacctttatattggctgcttatggtgacaatcagagaattgttaccatatagctattggattggccatccggtgtctaatagagctattgtatatctgtttgttggattcactccgctgacctacaaatctctaaacaccttgtgctatattttgaatctaaatacacgaaa

SEQ ID NO: 22967 - DNA, 575 bp, synthetic construct
  source 1..575: mol_type = other DNA
agcacttctgtttccccgggtcgagtatcaataagctgttcacacggctgaaggagaaaacacccgttatccggccaactacttcgagaaacctagtaccaccatgaacgttgcaaggtgtttcgctcagcacttcccccgtgtagatcaggccgatgagtcaccgcataccccacgggtgaccgtggcggtggctgcgttggcggcctgcctatgggttaacccataggacgccttaatactgacatggtgcgaagagtctattgagctagttggtagtcctccggcccctgaatgcggctaatcctaactgcggagcacacactcacaaaccagtgagcggtgtgtcgtaacgggcaactctgcagcggaaccgactactttgggtgtccgtgtttccttttacctttatattggctgcttatggtgacaatcagagaattgttaccatatagctattggattggccatccggtgtctaatagagctattgtatatctgtttgttggattcactccgctgacctacaaatctctaaacaccttgtgctatattttgaatctaaatacacgaaa

SEQ ID NO: 22968 - DNA, 525 bp, synthetic construct
  source 1..525: mol_type = other DNA
aaggagaaaacacccgttatccggccaactacttcgagaaacctagtaccaccatgaacgttgcaaggtgtttcgctcagcacttcccccgtgtagatcaggccgatgagtcaccgcataccccacgggtgaccgtggcggtggctgcgttggcggcctgcctatgggttaacccataggacgccttaatactgacatggtgcgaagagtctattgagctagttggtagtcctccggcccctgaatgcggctaatcctaactgcggagcacacactcacaaaccagtgagcggtgtgtcgtaacgggcaactctgcagcggaaccgactactttgggtgtccgtgtttccttttacctttatattggctgcttatggtgacaatcagagaattgttaccatatagctattggattggccatccggtgtctaatagagctattgtatatctgtttgttggattcactccgctgacctacaaatctctaaacaccttgtgctatattttgaatctaaatacacgaaa

SEQ ID NO: 22969 - DNA, 675 bp, synthetic construct
  source 1..675: mol_type = other DNA
actctggtatcacggtacctttgcacgcctattttataccccttccccatcgtaacttagaagcaacaaacaaactgcccaatagcagcacaacacccagttgtgttaggggcaagcacttctgtttccccggaagggtctgacggtatgctgtacccacggcagaagtatgacctaccgttaaccggccatgtacttcgagaagcctagtaccattatgaaggttgattgatgttacgctccccagcaaccccagctggtagttctggtcgatgagtctcggcattccccacgggcgaccgtggccgaggctgcgttggcggccagcctacaccatacggtgtaggacgtcaagatactgacatggtgtgaagagcctattgagctacgtggtagtcctccggcccctgaatgcggctaatcctaactccggagcatccgccagtaagcccactggaagggtgtcgtaatgcgaaagtctggagcggaaccgactactttgggtgtccgtgtttcctgttttacttattgtttggctgcttatggtgacaacttatagttatcatcataagctacttggtcttgccaaccggagaattatttggttatttgttggtttcataaacctacagtcgtattttcctgtcttattaattgttctcaaaattaacaaca

SEQ ID NO: 22970 - DNA, 625 bp, synthetic construct
  source 1..625: mol_type = other DNA
cgtaacttagaagcaacaaacaaactgcccaatagcagcacaacacccagttgtgttaggggcaagcacttctgtttccccggaagggtctgacggtatgctgtacccacggcagaagtatgacctaccgttaaccggccatgtacttcgagaagcctagtaccattatgaaggttgattgatgttacgctccccagcaaccccagctggtagttctggtcgatgagtctcggcattccccacgggcgaccgtggccgaggctgcgttggcggccagcctacaccatacggtgtaggacgtcaagatactgacatggtgtgaagagcctattgagctacgtggtagtcctccggcccctgaatgcggctaatcctaactccggagcatccgccagtaagcccactggaagggtgtcgtaatgcgaaagtctggagcggaaccgactactttgggtgtccgtgtttcctgttttacttattgtttggctgcttatggtgacaacttatagttatcatcataagctacttggtcttgccaaccggagaattatttggttatttgttggtttcataaacctacagtcgtattttcctgtcttattaattgttctcaaaattaacaaca

SEQ ID NO: 22971 - DNA, 575 bp, synthetic construct
  source 1..575: mol_type = other DNA
ttgtgttaggggcaagcacttctgtttccccggaagggtctgacggtatgctgtacccacggcagaagtatgacctaccgttaaccggccatgtacttcgagaagcctagtaccattatgaaggttgattgatgttacgctccccagcaaccccagctggtagttctggtcgatgagtctcggcattccccacgggcgaccgtggccgaggctgcgttggcggccagcctacaccatacggtgtaggacgtcaagatactgacatggtgtgaagagcctattgagctacgtggtagtcctccggcccctgaatgcggctaatcctaactccggagcatccgccagtaagcccactggaagggtgtcgtaatgcgaaagtctggagcggaaccgactactttgggtgtccgtgtttcctgttttacttattgtttggctgcttatggtgacaacttatagttatcatcataagctacttggtcttgccaaccggagaattatttggttatttgttggtttcataaacctacagtcgtattttcctgtcttattaattgttctcaaaattaacaaca

SEQ ID NO: 22972 - DNA, 525 bp, synthetic construct
  source 1..525: mol_type = other DNA
ctgtacccacggcagaagtatgacctaccgttaaccggccatgtacttcgagaagcctagtaccattatgaaggttgattgatgttacgctccccagcaaccccagctggtagttctggtcgatgagtctcggcattccccacgggcgaccgtggccgaggctgcgttggcggccagcctacaccatacggtgtaggacgtcaagatactgacatggtgtgaagagcctattgagctacgtggtagtcctccggcccctgaatgcggctaatcctaactccggagcatccgccagtaagcccactggaagggtgtcgtaatgcgaaagtctggagcggaaccgactactttgggtgtccgtgtttcctgttttacttattgtttggctgcttatggtgacaacttatagttatcatcataagctacttggtcttgccaaccggagaattatttggttatttgttggtttcataaacctacagtcgtattttcctgtcttattaattgttctcaaaattaacaaca

SEQ ID NO: 22973 - DNA, 675 bp, synthetic construct
  source 1..675: mol_type = other DNA
ctttgtacgcctgttttatattccttcccctatcgtaacttagaagtttcaaacacagctcaacagacagtagtacataccagtactgctacgagcaagcacttctgttaccccggtgaagtcacatagactgtgcccacggttgaaagtgactgatccgttacccgctttagtacttcgagaagcctagtaatatcttggaatcttcgatgcgttgcgctcaacactcaaccccagagtgtagcttaggtcgatgagtctggacactccccaccggcgacggtggtccaggctgcgttggcggcctacctgtggcccaaagccacaggacgctagttgtgaacaaggtgtgaagagcctattgagctactaaagagtcctccggcccctgaatgcggctaatcccaaccacggagcaagtgctcacaatccagtgagtggcttgtcgtaacgagcaattctgtggcggaaccgactactttgggtgtccgtgtttccttttatttttatcattggctgcttatggtgacaatctaagattgccatcatatagcttttggattggccatccggtgatattttgaattactcagcttgctgttcacagcactcttcaaatagtaattatttattaccacctgcagtttgttcttaaattgtctccagacagtcaaa

SEQ ID NO: 22974 - DNA, 625 bp, synthetic construct
  source 1..625: mol_type = other DNA
aaacacagctcaacagacagtagtacataccagtactgctacgagcaagcacttctgttaccccggtgaagtcacatagactgtgcccacggttgaaagtgactgatccgttacccgctttagtacttcgagaagcctagtaatatcttggaatcttcgatgcgttgcgctcaacactcaaccccagagtgtagcttaggtcgatgagtctggacactccccaccggcgacggtggtccaggctgcgttggcggcctacctgtggcccaaagccacaggacgctagttgtgaacaaggtgtgaagagcctattgagctactaaagagtcctccggcccctgaatgcggctaatcccaaccacggagcaagtgctcacaatccagtgagtggcttgtcgtaacgagcaattctgtggcggaaccgactactttgggtgtccgtgtttccttttatttttatcattggctgcttatggtgacaatctaagattgccatcatatagcttttggattggccatccggtgatattttgaattactcagcttgctgttcacagcactcttcaaatagtaattatttattaccacctgcagtttgttcttaaattgtctccagacagtcaaa

SEQ ID NO: 22975 - DNA, 575 bp, synthetic construct
  source 1..575: mol_type = other DNA
acttctgttaccccggtgaagtcacatagactgtgcccacggttgaaagtgactgatccgttacccgctttagtacttcgagaagcctagtaatatcttggaatcttcgatgcgttgcgctcaacactcaaccccagagtgtagcttaggtcgatgagtctggacactccccaccggcgacggtggtccaggctgcgttggcggcctacctgtggcccaaagccacaggacgctagttgtgaacaaggtgtgaagagcctattgagctactaaagagtcctccggcccctgaatgcggctaatcccaaccacggagcaagtgctcacaatccagtgagtggcttgtcgtaacgagcaattctgtggcggaaccgactactttgggtgtccgtgtttccttttatttttatcattggctgcttatggtgacaatctaagattgccatcatatagcttttggattggccatccggtgatattttgaattactcagcttgctgttcacagcactcttcaaatagtaattatttattaccacctgcagtttgttcttaaattgtctccagacagtcaaa

SEQ ID NO: 22976 - DNA, 525 bp, synthetic construct
  source 1..525: mol_type = other DNA
gactgatccgttacccgctttagtacttcgagaagcctagtaatatcttggaatcttcgatgcgttgcgctcaacactcaaccccagagtgtagcttaggtcgatgagtctggacactccccaccggcgacggtggtccaggctgcgttggcggcctacctgtggcccaaagccacaggacgctagttgtgaacaaggtgtgaagagcctattgagctactaaagagtcctccggcccctgaatgcggctaatcccaaccacggagcaagtgctcacaatccagtgagtggcttgtcgtaacgagcaattctgtggcggaaccgactactttgggtgtccgtgtttccttttatttttatcattggctgcttatggtgacaatctaagattgccatcatatagcttttggattggccatccggtgatattttgaattactcagcttgctgttcacagcactcttcaaatagtaattatttattaccacctgcagtttgttcttaaattgtctccagacagtcaaa

SEQ ID NO: 22977 - DNA, 675 bp, synthetic construct
  source 1..675: mol_type = other DNA
cttgtgcgcctgttttatacaccctacccccaaaacgtaatttagaagcaagtcaacaaagaccaatagcaagcacggcacaccagctgtgttttggtcaagcacttctgttaccccggactgagtatcaataggctactcacgtggctgaaggagaaaacgttcgttatccgtccaattacttcgagaagcctagtaacaccatagaggttgcgcagcgtttcgctccgcactaccccagtgtagatcaggtcgatgagtcaccgcattccccacgggtgaccgtggcggtggctgcgttggcggcctgcccatggggcaacccatgggacgcttcaatactgacatggtgcgaagagcctattgagctaattggaagtcctccggcccctgaatgcggctaatcctaactgcggagctggtacccacaaaccagtgggtggccagtcgtaacgggcaactctgcagcggaaccgactactttgggtgtccgtgtttcattttattcctatactggctgcttatggtgacaattgaaagattgttgccatatagctattggattggccatccggtgacaaataaagcgattgtttatcagttcattggtttcgtaccgctaaactacacaacattaaacaccctcaactttatcctattgctcaacacaacaag

SEQ ID NO: 22978 - DNA, 625 bp, synthetic construct
  source 1..625: mol_type = other DNA
agtcaacaaagaccaatagcaagcacggcacaccagctgtgttttggtcaagcacttctgttaccccggactgagtatcaataggctactcacgtggctgaaggagaaaacgttcgttatccgtccaattacttcgagaagcctagtaacaccatagaggttgcgcagcgtttcgctccgcactaccccagtgtagatcaggtcgatgagtcaccgcattccccacgggtgaccgtggcggtggctgcgttggcggcctgcccatggggcaacccatgggacgcttcaatactgacatggtgcgaagagcctattgagctaattggaagtcctccggcccctgaatgcggctaatcctaactgcggagctggtacccacaaaccagtgggtggccagtcgtaacgggcaactctgcagcggaaccgactactttgggtgtccgtgtttcattttattcctatactggctgcttatggtgacaattgaaagattgttgccatatagctattggattggccatccggtgacaaataaagcgattgtttatcagttcattggtttcgtaccgctaaactacacaacattaaacaccctcaactttatcctattgctcaacacaacaag

SEQ ID NO: 22979 - DNA, 575 bp, synthetic construct
  source 1..575: mol_type = other DNA
agcacttctgttaccccggactgagtatcaataggctactcacgtggctgaaggagaaaacgttcgttatccgtccaattacttcgagaagcctagtaacaccatagaggttgcgcagcgtttcgctccgcactaccccagtgtagatcaggtcgatgagtcaccgcattccccacgggtgaccgtggcggtggctgcgttggcggcctgcccatggggcaacccatgggacgcttcaatactgacatggtgcgaagagcctattgagctaattggaagtcctccggcccctgaatgcggctaatcctaactgcggagctggtacccacaaaccagtgggtggccagtcgtaacgggcaactctgcagcggaaccgactactttgggtgtccgtgtttcattttattcctatactggctgcttatggtgacaattgaaagattgttgccatatagctattggattggccatccggtgacaaataaagcgattgtttatcagttcattggtttcgtaccgctaaactacacaacattaaacaccctcaactttatcctattgctcaacacaacaag

SEQ ID NO: 22980 - DNA, 525 bp, synthetic construct
  source 1..525: mol_type = other DNA
aaggagaaaacgttcgttatccgtccaattacttcgagaagcctagtaacaccatagaggttgcgcagcgtttcgctccgcactaccccagtgtagatcaggtcgatgagtcaccgcattccccacgggtgaccgtggcggtggctgcgttggcggcctgcccatggggcaacccatgggacgcttcaatactgacatggtgcgaagagcctattgagctaattggaagtcctccggcccctgaatgcggctaatcctaactgcggagctggtacccacaaaccagtgggtggccagtcgtaacgggcaactctgcagcggaaccgactactttgggtgtccgtgtttcattttattcctatactggctgcttatggtgacaattgaaagattgttgccatatagctattggattggccatccggtgacaaataaagcgattgtttatcagttcattggtttcgtaccgctaaactacacaacattaaacaccctcaactttatcctattgctcaacacaacaag

SEQ ID NO: 22981 - DNA, 676 bp, synthetic construct
  source 1..676: mol_type = other DNA
ccttgtgcgcctgttttataaccctcccccgattcgtaacttagaagcaatgagcctcactgatcaacagtaggcgcggcgcaccagccgtgtcttgatcaagcactcctgtttccccgggctgagtatcaatagactgcttgcgcggttgaaggagaaaacgctcgttacccggctaactacttcgagaaacctagtagcaccatcgaaattgcagagtgtttcgctcagcacttcccccgtgtagatcaggtcgatgagtcactgcaacccccacgggcgaccgtggcagtggctgcgttggcggcctgcctatggggcaacccataggacgctctaaaatggacatggtgtgaagagtctattgagctagttagtagtcctccggcccctgaatgcggctaatcctaactgcggagcgcatgcccccaaaccagagggtggtgcgtcgtaacgggcaactctgcagcggaaccgactactttgggtgtccgtgtttccttttattcttactatggctgcttatggtgacaattgaagaattgttaccatatagctattggattggccatccggtgtctaatagagctattgtatatttatttgttggatttgttccattgacatatacatcacttaatacattaaacttcattgtgagattaaacacaagaaa

SEQ ID NO: 22982 - DNA, 626 bp, synthetic construct
  source 1..626: mol_type = other DNA
tgagcctcactgatcaacagtaggcgcggcgcaccagccgtgtcttgatcaagcactcctgtttccccgggctgagtatcaatagactgcttgcgcggttgaaggagaaaacgctcgttacccggctaactacttcgagaaacctagtagcaccatcgaaattgcagagtgtttcgctcagcacttcccccgtgtagatcaggtcgatgagtcactgcaacccccacgggcgaccgtggcagtggctgcgttggcggcctgcctatggggcaacccataggacgctctaaaatggacatggtgtgaagagtctattgagctagttagtagtcctccggcccctgaatgcggctaatcctaactgcggagcgcatgcccccaaaccagagggtggtgcgtcgtaacgggcaactctgcagcggaaccgactactttgggtgtccgtgtttccttttattcttactatggctgcttatggtgacaattgaagaattgttaccatatagctattggattggccatccggtgtctaatagagctattgtatatttatttgttggatttgttccattgacatatacatcacttaatacattaaacttcattgtgagattaaacacaagaaa

SEQ ID NO: 22983 - DNA, 576 bp, synthetic construct
  source 1..576: mol_type = other DNA
aagcactcctgtttccccgggctgagtatcaatagactgcttgcgcggttgaaggagaaaacgctcgttacccggctaactacttcgagaaacctagtagcaccatcgaaattgcagagtgtttcgctcagcacttcccccgtgtagatcaggtcgatgagtcactgcaacccccacgggcgaccgtggcagtggctgcgttggcggcctgcctatggggcaacccataggacgctctaaaatggacatggtgtgaagagtctattgagctagttagtagtcctccggcccctgaatgcggctaatcctaactgcggagcgcatgcccccaaaccagagggtggtgcgtcgtaacgggcaactctgcagcggaaccgactactttgggtgtccgtgtttccttttattcttactatggctgcttatggtgacaattgaagaattgttaccatatagctattggattggccatccggtgtctaatagagctattgtatatttatttgttggatttgttccattgacatatacatcacttaatacattaaacttcattgtgagattaaacacaagaaa

SEQ ID NO: 22984 - DNA, 526 bp, synthetic construct
  source 1..526: mol_type = other DNA
gaaggagaaaacgctcgttacccggctaactacttcgagaaacctagtagcaccatcgaaattgcagagtgtttcgctcagcacttcccccgtgtagatcaggtcgatgagtcactgcaacccccacgggcgaccgtggcagtggctgcgttggcggcctgcctatggggcaacccataggacgctctaaaatggacatggtgtgaagagtctattgagctagttagtagtcctccggcccctgaatgcggctaatcctaactgcggagcgcatgcccccaaaccagagggtggtgcgtcgtaacgggcaactctgcagcggaaccgactactttgggtgtccgtgtttccttttattcttactatggctgcttatggtgacaattgaagaattgttaccatatagctattggattggccatccggtgtctaatagagctattgtatatttatttgttggatttgttccattgacatatacatcacttaatacattaaacttcattgtgagattaaacacaagaaa

SEQ ID NO: 22985 - DNA, 676 bp, synthetic construct
  source 1..676: mol_type = other DNA
gtacaccggtatcacggtacccttgtacgcctgttttatactccctaccccgtaacttagaagcattgactcaagttcaatagtaggggtacaaaccagtaccaccacgaacaagcacttctgtttccccggtgatgtcgtatagactgtacccacggttgaaagtgacagatccgttacccgcttttgtacttcgagaagcccagtaccaccttggaatcttcgatgcgttgcgctcagcactcaatcccagagtgtagcttaggtcgatgagtctggacgttcctcaccggcgacggtggtccaggctgcgttggcggcctacctgtggcccaaagccacaggacgctagttgtgaacaaggtgtgaagagcctattgagctacaaaagagtcctccggcccctgaatgcggctaatcctaaccacggagcaggtgatcacaagccagtgattagcctgtcgtaatgcgcaagtctgtggcggaaccgactactttgggtgtccgtgtttccttttatttcatttatggctgcttatggtgacaatcatagattgttgtcataaagcgaattggattggccatccggtgagagtttagcgctttatttgtctgctcatcgaacttgcacttttgaattcttaccccttgcaccttattagacagtggtatcatc

SEQ ID NO: 22986 - DNA, 626 bp, synthetic construct
  source 1..626: mol_type = other DNA
cgtaacttagaagcattgactcaagttcaatagtaggggtacaaaccagtaccaccacgaacaagcacttctgtttccccggtgatgtcgtatagactgtacccacggttgaaagtgacagatccgttacccgcttttgtacttcgagaagcccagtaccaccttggaatcttcgatgcgttgcgctcagcactcaatcccagagtgtagcttaggtcgatgagtctggacgttcctcaccggcgacggtggtccaggctgcgttggcggcctacctgtggcccaaagccacaggacgctagttgtgaacaaggtgtgaagagcctattgagctacaaaagagtcctccggcccctgaatgcggctaatcctaaccacggagcaggtgatcacaagccagtgattagcctgtcgtaatgcgcaagtctgtggcggaaccgactactttgggtgtccgtgtttccttttatttcatttatggctgcttatggtgacaatcatagattgttgtcataaagcgaattggattggccatccggtgagagtttagcgctttatttgtctgctcatcgaacttgcacttttgaattcttaccccttgcaccttattagacagtggtatcatc

SEQ ID NO: 22987 - DNA, 576 bp, synthetic construct
  source 1..576: mol_type = other DNA
accaccacgaacaagcacttctgtttccccggtgatgtcgtatagactgtacccacggttgaaagtgacagatccgttacccgcttttgtacttcgagaagcccagtaccaccttggaatcttcgatgcgttgcgctcagcactcaatcccagagtgtagcttaggtcgatgagtctggacgttcctcaccggcgacggtggtccaggctgcgttggcggcctacctgtggcccaaagccacaggacgctagttgtgaacaaggtgtgaagagcctattgagctacaaaagagtcctccggcccctgaatgcggctaatcctaaccacggagcaggtgatcacaagccagtgattagcctgtcgtaatgcgcaagtctgtggcggaaccgactactttgggtgtccgtgtttccttttatttcatttatggctgcttatggtgacaatcatagattgttgtcataaagcgaattggattggccatccggtgagagtttagcgctttatttgtctgctcatcgaacttgcacttttgaattcttaccccttgcaccttattagacagtggtatcatc

SEQ ID NO: 22988 - DNA, 526 bp, synthetic construct
  source 1..526: mol_type = other DNA
acccacggttgaaagtgacagatccgttacccgcttttgtacttcgagaagcccagtaccaccttggaatcttcgatgcgttgcgctcagcactcaatcccagagtgtagcttaggtcgatgagtctggacgttcctcaccggcgacggtggtccaggctgcgttggcggcctacctgtggcccaaagccacaggacgctagttgtgaacaaggtgtgaagagcctattgagctacaaaagagtcctccggcccctgaatgcggctaatcctaaccacggagcaggtgatcacaagccagtgattagcctgtcgtaatgcgcaagtctgtggcggaaccgactactttgggtgtccgtgtttccttttatttcatttatggctgcttatggtgacaatcatagattgttgtcataaagcgaattggattggccatccggtgagagtttagcgctttatttgtctgctcatcgaacttgcacttttgaattcttaccccttgcaccttattagacagtggtatcatc

SEQ ID NO: 22989 - DNA, 676 bp, synthetic construct
  source 1..676: mol_type = other DNA
cccttgtacgcctgttttatactccctaccccgtaacttagaagcaaaaactcaagttcaatagcaggggggtacaaaccagtaccaccacgaacaagcacttctgtttccccggtgacttcgcataaactgtacccacggttgaaagcgatagatccgttatccgcttttgtacttcgagaagcctagtaccatcttggaatcttcgatgcgttgcgatcagcactcaaacccagagtgtagcttaggtcgatgagtctggacgatcctcaccggcgacggtggtccaggctgcgttggcggcctacctgtggtccaaagccacaggacgctagttgtgaacaaggtgtgaagagcctattgagctacaaaagagtcctccggcccctgaatgcggctaatcccaaccacggagcaggcgatcacaacccagtgactagcctgtcgtaatgcgcaagtctgtggcggaaccgactactttgggtgtccgtgtttctctttattccattaatggctgcttatggtgacaatcatagattgttatcataaagcgattcggattggccatccagtgaaaatcaagtgtactactcacttatttattgagtttacaactctaacccatcactcactacaacccattttattgtgtcactatccagacagtggtatcatc

SEQ ID NO: 22990 - DNA, 626 bp, synthetic construct
  source 1..626: mol_type = other DNA
ctcaagttcaatagcaggggggtacaaaccagtaccaccacgaacaagcacttctgtttccccggtgacttcgcataaactgtacccacggttgaaagcgatagatccgttatccgcttttgtacttcgagaagcctagtaccatcttggaatcttcgatgcgttgcgatcagcactcaaacccagagtgtagcttaggtcgatgagtctggacgatcctcaccggcgacggtggtccaggctgcgttggcggcctacctgtggtccaaagccacaggacgctagttgtgaacaaggtgtgaagagcctattgagctacaaaagagtcctccggcccctgaatgcggctaatcccaaccacggagcaggcgatcacaacccagtgactagcctgtcgtaatgcgcaagtctgtggcggaaccgactactttgggtgtccgtgtttctctttattccattaatggctgcttatggtgacaatcatagattgttatcataaagcgattcggattggccatccagtgaaaatcaagtgtactactcacttatttattgagtttacaactctaacccatcactcactacaacccattttattgtgtcactatccagacagtggtatcatc

SEQ ID NO: 22991 - DNA, 576 bp, synthetic construct
  source 1..576: mol_type = other DNA
cttctgtttccccggtgacttcgcataaactgtacccacggttgaaagcgatagatccgttatccgcttttgtacttcgagaagcctagtaccatcttggaatcttcgatgcgttgcgatcagcactcaaacccagagtgtagcttaggtcgatgagtctggacgatcctcaccggcgacggtggtccaggctgcgttggcggcctacctgtggtccaaagccacaggacgctagttgtgaacaaggtgtgaagagcctattgagctacaaaagagtcctccggcccctgaatgcggctaatcccaaccacggagcaggcgatcacaacccagtgactagcctgtcgtaatgcgcaagtctgtggcggaaccgactactttgggtgtccgtgtttctctttattccattaatggctgcttatggtgacaatcatagattgttatcataaagcgattcggattggccatccagtgaaaatcaagtgtactactcacttatttattgagtttacaactctaacccatcactcactacaacccattttattgtgtcactatccagacagtggtatcatc

SEQ ID NO: 22992 - DNA, 526 bp, synthetic construct
  source 1..526: mol_type = other DNA
atagatccgttatccgcttttgtacttcgagaagcctagtaccatcttggaatcttcgatgcgttgcgatcagcactcaaacccagagtgtagcttaggtcgatgagtctggacgatcctcaccggcgacggtggtccaggctgcgttggcggcctacctgtggtccaaagccacaggacgctagttgtgaacaaggtgtgaagagcctattgagctacaaaagagtcctccggcccctgaatgcggctaatcccaaccacggagcaggcgatcacaacccagtgactagcctgtcgtaatgcgcaagtctgtggcggaaccgactactttgggtgtccgtgtttctctttattccattaatggctgcttatggtgacaatcatagattgttatcataaagcgattcggattggccatccagtgaaaatcaagtgtactactcacttatttattgagtttacaactctaacccatcactcactacaacccattttattgtgtcactatccagacagtggtatcatc

SEQ ID NO: 22993 - DNA, 676 bp, synthetic construct
  source 1..676: mol_type = other DNA
tttgtgcgcctgttttaaaacccctacccccaaacgcaacttagaagataagcacacagtccaatagagggcgtggcactccagccatgtcttggacaggcactcctgttaccccggactaagtaccaataaactgctcacgcggttgaaggggaaaacgttcgttatccggctaactacttcgaggaacctagtaacaccgtgaaagttgcagagtgtttcgctcagcacaaccccagtgtagatcaggtcgatgagtcaccacgttccccacgggcgaccgtggtggtggctgcgctggcggcctgcctatgggtcaacccataggacgctctaacacagacacggtgtgaagagtcgattgagctagttagtagtcctccggcccctgaatgcggctaatcctaactgcggagcgtgcgtccccaaaccaggagatagcgcgtcgtaacgggcaactctgcagcggaaccgactactttgggtgtccgtgtttccttttttttacctctatttggctgcttatggtgacaattgaagaattgttaccatatagctattggattggccatccggtgactaatagagctattgtttacctctttgttggttttgtaccactgaacctcatagttctaaatacccttaatttgattttagtgcttaacacatcaaa

SEQ ID NO: 22994 - DNA, 626 bp, synthetic construct
  source 1..626: mol_type = other DNA
agcacacagtccaatagagggcgtggcactccagccatgtcttggacaggcactcctgttaccccggactaagtaccaataaactgctcacgcggttgaaggggaaaacgttcgttatccggctaactacttcgaggaacctagtaacaccgtgaaagttgcagagtgtttcgctcagcacaaccccagtgtagatcaggtcgatgagtcaccacgttccccacgggcgaccgtggtggtggctgcgctggcggcctgcctatgggtcaacccataggacgctctaacacagacacggtgtgaagagtcgattgagctagttagtagtcctccggcccctgaatgcggctaatcctaactgcggagcgtgcgtccccaaaccaggagatagcgcgtcgtaacgggcaactctgcagcggaaccgactactttgggtgtccgtgtttccttttttttacctctatttggctgcttatggtgacaattgaagaattgttaccatatagctattggattggccatccggtgactaatagagctattgtttacctctttgttggttttgtaccactgaacctcatagttctaaatacccttaatttgattttagtgcttaacacatcaaa

SEQ ID NO: 22995 - DNA, 576 bp, synthetic construct
  source 1..576: mol_type = other DNA
cactcctgttaccccggactaagtaccaataaactgctcacgcggttgaaggggaaaacgttcgttatccggctaactacttcgaggaacctagtaacaccgtgaaagttgcagagtgtttcgctcagcacaaccccagtgtagatcaggtcgatgagtcaccacgttccccacgggcgaccgtggtggtggctgcgctggcggcctgcctatgggtcaacccataggacgctctaacacagacacggtgtgaagagtcgattgagctagttagtagtcctccggcccctgaatgcggctaatcctaactgcggagcgtgcgtccccaaaccaggagatagcgcgtcgtaacgggcaactctgcagcggaaccgactactttgggtgtccgtgtttccttttttttacctctatttggctgcttatggtgacaattgaagaattgttaccatatagctattggattggccatccggtgactaatagagctattgtttacctctttgttggttttgtaccactgaacctcatagttctaaatacccttaatttgattttagtgcttaacacatcaaa

SEQ ID NO: 22996 - DNA, 526 bp, synthetic construct
  source 1..526: mol_type = other DNA
ggggaaaacgttcgttatccggctaactacttcgaggaacctagtaacaccgtgaaagttgcagagtgtttcgctcagcacaaccccagtgtagatcaggtcgatgagtcaccacgttccccacgggcgaccgtggtggtggctgcgctggcggcctgcctatgggtcaacccataggacgctctaacacagacacggtgtgaagagtcgattgagctagttagtagtcctccggcccctgaatgcggctaatcctaactgcggagcgtgcgtccccaaaccaggagatagcgcgtcgtaacgggcaactctgcagcggaaccgactactttgggtgtccgtgtttccttttttttacctctatttggctgcttatggtgacaattgaagaattgttaccatatagctattggattggccatccggtgactaatagagctattgtttacctctttgttggttttgtaccactgaacctcatagttctaaatacccttaatttgattttagtgcttaacacatcaaa

SEQ ID NO: 22997 - DNA, 677 bp, synthetic construct
  source 1..677: mol_type = other DNA
gtactccggtaccccggtacccttgtacgcctgttttatactccctttcccaagtaactttagaagaaataaactaatgttcaacaggagggggtacaaaccagtaccaccacgaacacacacttctgtttccccggtgaagttgcatagactgtacccacggttgaaagcgatgaatccgttacccgcttaggtacttcgagaagcctagtatcatcttggaatcttcgatgcgttgcgatcagcactctaccccgagtgtagcttgggtcgatgagtctggacaccccacaccggcgacggtggtccaggctgcgttggcggcctacccatggctagcaccatgggacgctagttgtgaacaaggtgcgaagagcctattgagctacctgagagtcctccggcccctgaatgcggctaatcccaaccacggagcaaatgctcacaatccagtgagtggtttgtcgtaatgcgcaagtctgtggcggaaccgactactttgggcgtccgtgtttccttttatttttattatggctgcttatggtgacaatctgagattgttatcatatagctattggattagccatccggtgatatcttgaaattttgccataactttttcacaaatcctacaacattacactacactttctcttgaataattgagacaactcata

SEQ ID NO: 22998 - DNA, 627 bp, synthetic construct
  source 1..627: mol_type = other DNA
caagtaactttagaagaaataaactaatgttcaacaggagggggtacaaaccagtaccaccacgaacacacacttctgtttccccggtgaagttgcatagactgtacccacggttgaaagcgatgaatccgttacccgcttaggtacttcgagaagcctagtatcatcttggaatcttcgatgcgttgcgatcagcactctaccccgagtgtagcttgggtcgatgagtctggacaccccacaccggcgacggtggtccaggctgcgttggcggcctacccatggctagcaccatgggacgctagttgtgaacaaggtgcgaagagcctattgagctacctgagagtcctccggcccctgaatgcggctaatcccaaccacggagcaaatgctcacaatccagtgagtggtttgtcgtaatgcgcaagtctgtggcggaaccgactactttgggcgtccgtgtttccttttatttttattatggctgcttatggtgacaatctgagattgttatcatatagctattggattagccatccggtgatatcttgaaattttgccataactttttcacaaatcctacaacattacactacactttctcttgaataattgagacaactcata

SEQ ID NO: 22999 - DNA, 577 bp, synthetic construct
  source 1..577: mol_type = other DNA
ccagtaccaccacgaacacacacttctgtttccccggtgaagttgcatagactgtacccacggttgaaagcgatgaatccgttacccgcttaggtacttcgagaagcctagtatcatcttggaatcttcgatgcgttgcgatcagcactctaccccgagtgtagcttgggtcgatgagtctggacaccccacaccggcgacggtggtccaggctgcgttggcggcctacccatggctagcaccatgggacgctagttgtgaacaaggtgcgaagagcctattgagctacctgagagtcctccggcccctgaatgcggctaatcccaaccacggagcaaatgctcacaatccagtgagtggtttgtcgtaatgcgcaagtctgtggcggaaccgactactttgggcgtccgtgtttccttttatttttattatggctgcttatggtgacaatctgagattgttatcatatagctattggattagccatccggtgatatcttgaaattttgccataactttttcacaaatcctacaacattacactacactttctcttgaataattgagacaactcata

SEQ ID NO: 23000 - DNA, 527 bp, synthetic construct
  source 1..527: mol_type = other DNA
actgtacccacggttgaaagcgatgaatccgttacccgcttaggtacttcgagaagcctagtatcatcttggaatcttcgatgcgttgcgatcagcactctaccccgagtgtagcttgggtcgatgagtctggacaccccacaccggcgacggtggtccaggctgcgttggcggcctacccatggctagcaccatgggacgctagttgtgaacaaggtgcgaagagcctattgagctacctgagagtcctccggcccctgaatgcggctaatcccaaccacggagcaaatgctcacaatccagtgagtggtttgtcgtaatgcgcaagtctgtggcggaaccgactactttgggcgtccgtgtttccttttatttttattatggctgcttatggtgacaatctgagattgttatcatatagctattggattagccatccggtgatatcttgaaattttgccataactttttcacaaatcctacaacattacactacactttctcttgaataattgagacaactcata

SEQ ID NO: 23001 - DNA, 678 bp, synthetic construct
  source 1..678: mol_type = other DNA
ctttgtacgcctgttttatatccctttccccattgtaacttagaagtttcaaagtacagttcaatagacagtagtacaaaccagtactgctacgaacaagcacttctgttgccccggtgtagttgcatagactgtacccacggttgaaagcaactgatccgttatccgctttagtacttcgagaagcctagtagcaccttgggatcttcgatgcgttgcgctcagcactcaaccccagagtgtagcttgggtcgatgagtctggacattcctcaccggcgacggtggtccaggctgcgttggcggcctacctgtggcccaaagccacaggacgctagttgtgaacaaggtgtgaagagcctattgagctactaaagagtcctccggcccctgaatgcggctaatcctaaccacggagcaagtgctcacagtccagtgagtagcttgtcgtaatgagcaattctgtggcggaaccgactactttgggtgtccgtgtttccttttatttttatcattggctgcttatggtgacaatctaaggttgccatcatatagcttttggattggccatcccggtgatatttcgaattattcaatttgctgtttgcagctccttttaaacagtattcactcaccagcattcatattttactcttgagttattaacaaatagtcaaaa

SEQ ID NO: 23002 - DNA, 628 bp, synthetic construct
  source 1..628: mol_type = other DNA
aaagtacagttcaatagacagtagtacaaaccagtactgctacgaacaagcacttctgttgccccggtgtagttgcatagactgtacccacggttgaaagcaactgatccgttatccgctttagtacttcgagaagcctagtagcaccttgggatcttcgatgcgttgcgctcagcactcaaccccagagtgtagcttgggtcgatgagtctggacattcctcaccggcgacggtggtccaggctgcgttggcggcctacctgtggcccaaagccacaggacgctagttgtgaacaaggtgtgaagagcctattgagctactaaagagtcctccggcccctgaatgcggctaatcctaaccacggagcaagtgctcacagtccagtgagtagcttgtcgtaatgagcaattctgtggcggaaccgactactttgggtgtccgtgtttccttttatttttatcattggctgcttatggtgacaatctaaggttgccatcatatagcttttggattggccatcccggtgatatttcgaattattcaatttgctgtttgcagctccttttaaacagtattcactcaccagcattcatattttactcttgagttattaacaaatagtcaaaa

SEQ ID NO: 23003 - DNA, 578 bp, synthetic construct
  source 1..578: mol_type = other DNA
cacttctgttgccccggtgtagttgcatagactgtacccacggttgaaagcaactgatccgttatccgctttagtacttcgagaagcctagtagcaccttgggatcttcgatgcgttgcgctcagcactcaaccccagagtgtagcttgggtcgatgagtctggacattcctcaccggcgacggtggtccaggctgcgttggcggcctacctgtggcccaaagccacaggacgctagttgtgaacaaggtgtgaagagcctattgagctactaaagagtcctccggcccctgaatgcggctaatcctaaccacggagcaagtgctcacagtccagtgagtagcttgtcgtaatgagcaattctgtggcggaaccgactactttgggtgtccgtgtttccttttatttttatcattggctgcttatggtgacaatctaaggttgccatcatatagcttttggattggccatcccggtgatatttcgaattattcaatttgctgtttgcagctccttttaaacagtattcactcaccagcattcatattttactcttgagttattaacaaatagtcaaaa

SEQ ID NO: 23004 - DNA, 528 bp, synthetic construct
  source 1..528: mol_type = other DNA
caactgatccgttatccgctttagtacttcgagaagcctagtagcaccttgggatcttcgatgcgttgcgctcagcactcaaccccagagtgtagcttgggtcgatgagtctggacattcctcaccggcgacggtggtccaggctgcgttggcggcctacctgtggcccaaagccacaggacgctagttgtgaacaaggtgtgaagagcctattgagctactaaagagtcctccggcccctgaatgcggctaatcctaaccacggagcaagtgctcacagtccagtgagtagcttgtcgtaatgagcaattctgtggcggaaccgactactttgggtgtccgtgtttccttttatttttatcattggctgcttatggtgacaatctaaggttgccatcatatagcttttggattggccatcccggtgatatttcgaattattcaatttgctgtttgcagctccttttaaacagtattcactcaccagcattcatattttactcttgagttattaacaaatagtcaaaa

SEQ ID NO: 23005 - DNA, 679 bp, synthetic construct
  source 1..679: mol_type = other DNA
acctcagtcctcttggtactttctcgcctgagtcaacaaagcgagaaacctgcccctccagcgccagacgagcggcataaaacttgaacttctggcatgctccaccacccttttccccattccaacccccattgcgctctcaaggtcgcgctttttcgagactagctcggattcaaaagttcctggcaccctttgccccttcaggcccttaaggtaggaactgaccttgtgctgtgccctcggtgcggaagtgctactgcgtagcgattgtaagatccctttgtggttctgccctggcaaggttatagagtactgtgatccgctgcggatgccatcctggtaacaggacccccagtgtgcgcaacagtatgttcacggtcttccgtgtccaccacattcggaacactgctctcgtgaaacagtgtgtgtccaatccctgcaatcagtatcaactacaccacctaggaatgctaggaaggtaccccggtccgccgggatctgatcctaggctaattgtctacggtggtgctcctttttattttccacttcaattcattggttacaactgctcgatccctgtgtttgctgcccttctctgctctcatcgccattctcaagtgttcacactgtccaagttcctttggttgttcgcttccacttgccactgtcaactcttgtc

SEQ ID NO: 23006 - DNA, 629 bp, synthetic construct
  source 1..629: mol_type = other DNA
tgcccctccagcgccagacgagcggcataaaacttgaacttctggcatgctccaccacccttttccccattccaacccccattgcgctctcaaggtcgcgctttttcgagactagctcggattcaaaagttcctggcaccctttgccccttcaggcccttaaggtaggaactgaccttgtgctgtgccctcggtgcggaagtgctactgcgtagcgattgtaagatccctttgtggttctgccctggcaaggttatagagtactgtgatccgctgcggatgccatcctggtaacaggacccccagtgtgcgcaacagtatgttcacggtcttccgtgtccaccacattcggaacactgctctcgtgaaacagtgtgtgtccaatccctgcaatcagtatcaactacaccacctaggaatgctaggaaggtaccccggtccgccgggatctgatcctaggctaattgtctacggtggtgctcctttttattttccacttcaattcattggttacaactgctcgatccctgtgtttgctgcccttctctgctctcatcgccattctcaagtgttcacactgtccaagttcctttggttgttcgcttccacttgccactgtcaactcttgtc

SEQ ID NO: 23007 - DNA, 579 bp, synthetic construct
  source 1..579: mol_type = other DNA
tccaccacccttttccccattccaacccccattgcgctctcaaggtcgcgctttttcgagactagctcggattcaaaagttcctggcaccctttgccccttcaggcccttaaggtaggaactgaccttgtgctgtgccctcggtgcggaagtgctactgcgtagcgattgtaagatccctttgtggttctgccctggcaaggttatagagtactgtgatccgctgcggatgccatcctggtaacaggacccccagtgtgcgcaacagtatgttcacggtcttccgtgtccaccacattcggaacactgctctcgtgaaacagtgtgtgtccaatccctgcaatcagtatcaactacaccacctaggaatgctaggaaggtaccccggtccgccgggatctgatcctaggctaattgtctacggtggtgctcctttttattttccacttcaattcattggttacaactgctcgatccctgtgtttgctgcccttctctgctctcatcgccattctcaagtgttcacactgtccaagttcctttggttgttcgcttccacttgccactgtcaactcttgtc

SEQ ID NO: 23008 - DNA, 529 bp, synthetic construct
  source 1..529: mol_type = other DNA
ctttttcgagactagctcggattcaaaagttcctggcaccctttgccccttcaggcccttaaggtaggaactgaccttgtgctgtgccctcggtgcggaagtgctactgcgtagcgattgtaagatccctttgtggttctgccctggcaaggttatagagtactgtgatccgctgcggatgccatcctggtaacaggacccccagtgtgcgcaacagtatgttcacggtcttccgtgtccaccacattcggaacactgctctcgtgaaacagtgtgtgtccaatccctgcaatcagtatcaactacaccacctaggaatgctaggaaggtaccccggtccgccgggatctgatcctaggctaattgtctacggtggtgctcctttttattttccacttcaattcattggttacaactgctcgatccctgtgtttgctgcccttctctgctctcatcgccattctcaagtgttcacactgtccaagttcctttggttgttcgcttccacttgccactgtcaactcttgtc

SEQ ID NO: 23009 - DNA, 679 bp, synthetic construct
  source 1..679: mol_type = other DNA
aatctttgtgcgcctgttttatatccccttccctattcgtaacttagaagtaatgagcaacaacgatcaatagcaggcgtggcgcaccagccatgtcttgatcaagcacttctgttaccccggactgagtatcaatagactgctcacgcggttgaaggagaaaacgttcgttacccggctaaccacttcggaaaacctagtagcaccattgaagctgcagagtgtttcgctcagcacttcccccgtgtagatcaggtcgatgagtcactgcaacccccacgggcgaccgtggcagtggctgcgttggcggcctgcctatggggtaacccataggacgctctaatgtggacatggtgtgaagagtctactgagctggttagtagtcctccggcccctgaatgcggctaatcctaactgtggagcgcacactctcaaaccagggagcagtgcgtcgtaacgggcaactccgcagcggaaccgactactttgggtgtccgtgtttccttttatccttatattggctgcttatggtgacaatcacggaattgttgccatatagctattggattggccatccggtgtctaatagagctattgtgtacctatttgttggatttactccactgtcatataaatctctgaacactttgtgctttatattgaacttaaacacacgaaa

SEQ ID NO: 23010 - DNA, 629 bp, synthetic construct
  source 1..629: mol_type = other DNA
taatgagcaacaacgatcaatagcaggcgtggcgcaccagccatgtcttgatcaagcacttctgttaccccggactgagtatcaatagactgctcacgcggttgaaggagaaaacgttcgttacccggctaaccacttcggaaaacctagtagcaccattgaagctgcagagtgtttcgctcagcacttcccccgtgtagatcaggtcgatgagtcactgcaacccccacgggcgaccgtggcagtggctgcgttggcggcctgcctatggggtaacccataggacgctctaatgtggacatggtgtgaagagtctactgagctggttagtagtcctccggcccctgaatgcggctaatcctaactgtggagcgcacactctcaaaccagggagcagtgcgtcgtaacgggcaactccgcagcggaaccgactactttgggtgtccgtgtttccttttatccttatattggctgcttatggtgacaatcacggaattgttgccatatagctattggattggccatccggtgtctaatagagctattgtgtacctatttgttggatttactccactgtcatataaatctctgaacactttgtgctttatattgaacttaaacacacgaaa

SEQ ID NO: 23011 - DNA, 579 bp, synthetic construct
  source 1..579: mol_type = other DNA
atcaagcacttctgttaccccggactgagtatcaatagactgctcacgcggttgaaggagaaaacgttcgttacccggctaaccacttcggaaaacctagtagcaccattgaagctgcagagtgtttcgctcagcacttcccccgtgtagatcaggtcgatgagtcactgcaacccccacgggcgaccgtggcagtggctgcgttggcggcctgcctatggggtaacccataggacgctctaatgtggacatggtgtgaagagtctactgagctggttagtagtcctccggcccctgaatgcggctaatcctaactgtggagcgcacactctcaaaccagggagcagtgcgtcgtaacgggcaactccgcagcggaaccgactactttgggtgtccgtgtttccttttatccttatattggctgcttatggtgacaatcacggaattgttgccatatagctattggattggccatccggtgtctaatagagctattgtgtacctatttgttggatttactccactgtcatataaatctctgaacactttgtgctttatattgaacttaaacacacgaaa

SEQ ID NO: 23012 - DNA, 529 bp, synthetic construct
  source 1..529: mol_type = other DNA
gttgaaggagaaaacgttcgttacccggctaaccacttcggaaaacctagtagcaccattgaagctgcagagtgtttcgctcagcacttcccccgtgtagatcaggtcgatgagtcactgcaacccccacgggcgaccgtggcagtggctgcgttggcggcctgcctatggggtaacccataggacgctctaatgtggacatggtgtgaagagtctactgagctggttagtagtcctccggcccctgaatgcggctaatcctaactgtggagcgcacactctcaaaccagggagcagtgcgtcgtaacgggcaactccgcagcggaaccgactactttgggtgtccgtgtttccttttatccttatattggctgcttatggtgacaatcacggaattgttgccatatagctattggattggccatccggtgtctaatagagctattgtgtacctatttgttggatttactccactgtcatataaatctctgaacactttgtgctttatattgaacttaaacacacgaaa

SEQ ID NO: 23013 - DNA, 679 bp, synthetic construct
  source 1..679: mol_type = other DNA
agtactctggtattacggtacctttgtacgcctgttttatatcccctttcccctgtaactcagaagcatgaagtttaagctcaacaggaggggtgcaaaccagcacctctacgagcaagcactactgtttccccggtgaagttacatagactgttcccacggttgaaagtgattgatccgttatccgctcatgtacttcgagaagcctagtatcgctctggaatcttcgatgcgttgcgctcaacactcgaccccggagtgtagcttaggccgatgagtctggacattccccactggcgacagtggtccaggctgcgttggcggcctacctgtggtccaaagccacaggacgctagttgtgaacagggtgtgaagagcctattgagctgcatgagagtcctccggcccctgaatgcggataatcctaaccatggagcaggcaactgcaacccagcagtcagcctgtcgtaacgcgtaagtccgtggcggaaccgactactttgggtgtccgtgtttccttttatttttgaatggctgcttatggtgacaatcacagattgttatcataaagcaaattggattggccatccagtgaatcactaccgagtttgttaaatctatttcagagacacacaactcctcaacgcactatacctaaacagaggattatactacagcg

SEQ ID NO: 23014 - DNA, 629 bp, synthetic construct
  source 1..629: mol_type = other DNA
ccctgtaactcagaagcatgaagtttaagctcaacaggaggggtgcaaaccagcacctctacgagcaagcactactgtttccccggtgaagttacatagactgttcccacggttgaaagtgattgatccgttatccgctcatgtacttcgagaagcctagtatcgctctggaatcttcgatgcgttgcgctcaacactcgaccccggagtgtagcttaggccgatgagtctggacattccccactggcgacagtggtccaggctgcgttggcggcctacctgtggtccaaagccacaggacgctagttgtgaacagggtgtgaagagcctattgagctgcatgagagtcctccggcccctgaatgcggataatcctaaccatggagcaggcaactgcaacccagcagtcagcctgtcgtaacgcgtaagtccgtggcggaaccgactactttgggtgtccgtgtttccttttatttttgaatggctgcttatggtgacaatcacagattgttatcataaagcaaattggattggccatccagtgaatcactaccgagtttgttaaatctatttcagagacacacaactcctcaacgcactatacctaaacagaggattatactacagcg

SEQ ID NO: 23015 - DNA, 579 bp, synthetic construct
  source 1..579: mol_type = other DNA
cagcacctctacgagcaagcactactgtttccccggtgaagttacatagactgttcccacggttgaaagtgattgatccgttatccgctcatgtacttcgagaagcctagtatcgctctggaatcttcgatgcgttgcgctcaacactcgaccccggagtgtagcttaggccgatgagtctggacattccccactggcgacagtggtccaggctgcgttggcggcctacctgtggtccaaagccacaggacgctagttgtgaacagggtgtgaagagcctattgagctgcatgagagtcctccggcccctgaatgcggataatcctaaccatggagcaggcaactgcaacccagcagtcagcctgtcgtaacgcgtaagtccgtggcggaaccgactactttgggtgtccgtgtttccttttatttttgaatggctgcttatggtgacaatcacagattgttatcataaagcaaattggattggccatccagtgaatcactaccgagtttgttaaatctatttcagagacacacaactcctcaacgcactatacctaaacagaggattatactacagcg

SEQ ID NO: 23016 - DNA, 529 bp, synthetic construct
  source 1..529: mol_type = other DNA
ctgttcccacggttgaaagtgattgatccgttatccgctcatgtacttcgagaagcctagtatcgctctggaatcttcgatgcgttgcgctcaacactcgaccccggagtgtagcttaggccgatgagtctggacattccccactggcgacagtggtccaggctgcgttggcggcctacctgtggtccaaagccacaggacgctagttgtgaacagggtgtgaagagcctattgagctgcatgagagtcctccggcccctgaatgcggataatcctaaccatggagcaggcaactgcaacccagcagtcagcctgtcgtaacgcgtaagtccgtggcggaaccgactactttgggtgtccgtgtttccttttatttttgaatggctgcttatggtgacaatcacagattgttatcataaagcaaattggattggccatccagtgaatcactaccgagtttgttaaatctatttcagagacacacaactcctcaacgcactatacctaaacagaggattatactacagcg

SEQ ID NO: 23017 - DNA, 679 bp, synthetic construct
  source 1..679: mol_type = other DNA
tacctttgtgcgcctgttttatccaccccaccccctcaacgtaacttagaagcacatcccacacggtcaatagttggctcgataagccaatcgagtctggatcaagcacttctgttaccccggactgagtatcagtaagctgcttgcgcggctgatggagaaaacgttcgttacccggccatttacttcgggaaacctagtaccaccatgaatgttgcgcagcgtttcgctccacactaccccagtgtagatcaggtcgatgagtcactgcataccccacgggcgaccgtggcagtggctgcgctggcggcctgcccatggggcaacccatgggacgcttcaatactgacatggtgcgaagagtctactgagctaagtggtagtcctccggcccctgaatgcggctaatcctaactgcggagcagatacccacgaaccagtgggcagtctgtcgtaatgggcaactctgcagcggaaccgactactttgggtgtccgtgtttccttttattctaatactggctgcttatggtgacaattgaacgattgttaccatatagctattggattggccatccggtgacaaacagagcgattatatactcatttgttgggttcgtaccacttaattacaaagttctaaacacccttaactatatactagcactcaacacatcaaa

SEQ ID NO: 23018 - DNA, 629 bp, synthetic construct
  source 1..629: mol_type = other DNA
agcacatcccacacggtcaatagttggctcgataagccaatcgagtctggatcaagcacttctgttaccccggactgagtatcagtaagctgcttgcgcggctgatggagaaaacgttcgttacccggccatttacttcgggaaacctagtaccaccatgaatgttgcgcagcgtttcgctccacactaccccagtgtagatcaggtcgatgagtcactgcataccccacgggcgaccgtggcagtggctgcgctggcggcctgcccatggggcaacccatgggacgcttcaatactgacatggtgcgaagagtctactgagctaagtggtagtcctccggcccctgaatgcggctaatcctaactgcggagcagatacccacgaaccagtgggcagtctgtcgtaatgggcaactctgcagcggaaccgactactttgggtgtccgtgtttccttttattctaatactggctgcttatggtgacaattgaacgattgttaccatatagctattggattggccatccggtgacaaacagagcgattatatactcatttgttgggttcgtaccacttaattacaaagttctaaacacccttaactatatactagcactcaacacatcaaa

SEQ ID NO: 23019 - DNA, 579 bp, synthetic construct
  source 1..579: mol_type = other DNA
atcaagcacttctgttaccccggactgagtatcagtaagctgcttgcgcggctgatggagaaaacgttcgttacccggccatttacttcgggaaacctagtaccaccatgaatgttgcgcagcgtttcgctccacactaccccagtgtagatcaggtcgatgagtcactgcataccccacgggcgaccgtggcagtggctgcgctggcggcctgcccatggggcaacccatgggacgcttcaatactgacatggtgcgaagagtctactgagctaagtggtagtcctccggcccctgaatgcggctaatcctaactgcggagcagatacccacgaaccagtgggcagtctgtcgtaatgggcaactctgcagcggaaccgactactttgggtgtccgtgtttccttttattctaatactggctgcttatggtgacaattgaacgattgttaccatatagctattggattggccatccggtgacaaacagagcgattatatactcatttgttgggttcgtaccacttaattacaaagttctaaacacccttaactatatactagcactcaacacatcaaa

SEQ ID NO: 23020 - DNA, 529 bp, synthetic construct
  source 1..529: mol_type = other DNA
gctgatggagaaaacgttcgttacccggccatttacttcgggaaacctagtaccaccatgaatgttgcgcagcgtttcgctccacactaccccagtgtagatcaggtcgatgagtcactgcataccccacgggcgaccgtggcagtggctgcgctggcggcctgcccatggggcaacccatgggacgcttcaatactgacatggtgcgaagagtctactgagctaagtggtagtcctccggcccctgaatgcggctaatcctaactgcggagcagatacccacgaaccagtgggcagtctgtcgtaatgggcaactctgcagcggaaccgactactttgggtgtccgtgtttccttttattctaatactggctgcttatggtgacaattgaacgattgttaccatatagctattggattggccatccggtgacaaacagagcgattatatactcatttgttgggttcgtaccacttaattacaaagttctaaacacccttaactatatactagcactcaacacatcaaa

SEQ ID NO: 23021 - DNA, 680 bp, synthetic construct
  source 1..680: mol_type = other DNA
gtactctggtatcacggtacctttgtatgcctgttttatctcccttcccccgtaacgttagaagaataaacaaatgacaactagcaaatccaccaacccaggtgggttttcgtcaagcacttctgtttccccggacttagtaccaataggctgtacccacggctgaaggggaaaatgttcgttacccggctacctacttcgaaaagcctagtaccaccaatgattgtctcaagtgttacgttcagcacaaccccagtgtagttcaggccgatgagtcaccgaattccccacgggcgaccgtgtcggtggctgcgttggcggcctgcctgcgggtttcacccgcaggacgcttgattcatgacatggtgcgaagagcctattgagctaggtagtagtcctccggcccctgaatgcggctaatcctaaccacggagcattcactggcaaaccagccagcagaatgtcgtaatgggtaactctgtggcggaaccgactactttgggtgtccgtgtttcctgttttacttattttggctgcttatggtgacaatttacggattgttaccatatagctattggattggccatccggattattgcaatactactatttgtgggatttctccctttgtgttataataactaccccattctaacattagctctcaagtttaatacact

SEQ ID NO: 23022 - DNA, 630 bp, synthetic construct
  source 1..630: mol_type = other DNA
cgtaacgttagaagaataaacaaatgacaactagcaaatccaccaacccaggtgggttttcgtcaagcacttctgtttccccggacttagtaccaataggctgtacccacggctgaaggggaaaatgttcgttacccggctacctacttcgaaaagcctagtaccaccaatgattgtctcaagtgttacgttcagcacaaccccagtgtagttcaggccgatgagtcaccgaattccccacgggcgaccgtgtcggtggctgcgttggcggcctgcctgcgggtttcacccgcaggacgcttgattcatgacatggtgcgaagagcctattgagctaggtagtagtcctccggcccctgaatgcggctaatcctaaccacggagcattcactggcaaaccagccagcagaatgtcgtaatgggtaactctgtggcggaaccgactactttgggtgtccgtgtttcctgttttacttattttggctgcttatggtgacaatttacggattgttaccatatagctattggattggccatccggattattgcaatactactatttgtgggatttctccctttgtgttataataactaccccattctaacattagctctcaagtttaatacact

SEQ ID NO: 23023 - DNA, 580 bp, synthetic construct
  source 1..580: mol_type = other DNA
ggtgggttttcgtcaagcacttctgtttccccggacttagtaccaataggctgtacccacggctgaaggggaaaatgttcgttacccggctacctacttcgaaaagcctagtaccaccaatgattgtctcaagtgttacgttcagcacaaccccagtgtagttcaggccgatgagtcaccgaattccccacgggcgaccgtgtcggtggctgcgttggcggcctgcctgcgggtttcacccgcaggacgcttgattcatgacatggtgcgaagagcctattgagctaggtagtagtcctccggcccctgaatgcggctaatcctaaccacggagcattcactggcaaaccagccagcagaatgtcgtaatgggtaactctgtggcggaaccgactactttgggtgtccgtgtttcctgttttacttattttggctgcttatggtgacaatttacggattgttaccatatagctattggattggccatccggattattgcaatactactatttgtgggatttctccctttgtgttataataactaccccattctaacattagctctcaagtttaatacact

SEQ ID NO: 23024 - DNA, 530 bp, synthetic construct
  source 1..530: mol_type = other DNA
ctgtacccacggctgaaggggaaaatgttcgttacccggctacctacttcgaaaagcctagtaccaccaatgattgtctcaagtgttacgttcagcacaaccccagtgtagttcaggccgatgagtcaccgaattccccacgggcgaccgtgtcggtggctgcgttggcggcctgcctgcgggtttcacccgcaggacgcttgattcatgacatggtgcgaagagcctattgagctaggtagtagtcctccggcccctgaatgcggctaatcctaaccacggagcattcactggcaaaccagccagcagaatgtcgtaatgggtaactctgtggcggaaccgactactttgggtgtccgtgtttcctgttttacttattttggctgcttatggtgacaatttacggattgttaccatatagctattggattggccatccggattattgcaatactactatttgtgggatttctccctttgtgttataataactaccccattctaacattagctctcaagtttaatacact

SEQ ID NO: 23025 - DNA, 680 bp, synthetic construct
  source 1..680: mol_type = other DNA
tccttgtgcgcctgttttataaccccccccctcaattaggtaacatagaagttagaaacatatatggccaatagcaggcgtggcgcaccagtcgcgtctcggtcaagcacttctgtttccccggactgagtatcaataagctgctcgcgcggctgaaggagaaaacgttcgttatccggctaactacttcgagaaacctagtagcaccatgaaagttgcggagtgtttcgctcagcacttcccccgtgtagatcaggtcgatgagtcactgcattccccacgggcgaccgtggcagtggctgcgttggcggcctgcctatggggtaacccataggacgctctaatacggacatggtgcgaagagtcaattgagctagttagtagtcctccggcccctgaatgcggctaatcctaactgcggagcacataccctcaatccagggggcggtgtgtcgtaatgggcaactctgcagcggaaccgactactttgggtgtccgtgtttccttttattcttatattggctgcttatggtgacaattgagagattgttaccatatagctattggattggccatccggtgtccaacagagctctggtttacttgttcgttggctttatacctctgtcacccacagtttattcaactctagtgttcttaatacgccttaacagtaagag

SEQ ID NO: 23026 - DNA, 630 bp, synthetic construct
  source 1..630: mol_type = other DNA
gttagaaacatatatggccaatagcaggcgtggcgcaccagtcgcgtctcggtcaagcacttctgtttccccggactgagtatcaataagctgctcgcgcggctgaaggagaaaacgttcgttatccggctaactacttcgagaaacctagtagcaccatgaaagttgcggagtgtttcgctcagcacttcccccgtgtagatcaggtcgatgagtcactgcattccccacgggcgaccgtggcagtggctgcgttggcggcctgcctatggggtaacccataggacgctctaatacggacatggtgcgaagagtcaattgagctagttagtagtcctccggcccctgaatgcggctaatcctaactgcggagcacataccctcaatccagggggcggtgtgtcgtaatgggcaactctgcagcggaaccgactactttgggtgtccgtgtttccttttattcttatattggctgcttatggtgacaattgagagattgttaccatatagctattggattggccatccggtgtccaacagagctctggtttacttgttcgttggctttatacctctgtcacccacagtttattcaactctagtgttcttaatacgccttaacagtaagag

SEQ ID NO: 23027 - DNA, 580 bp, synthetic construct
  source 1..580: mol_type = other DNA
ggtcaagcacttctgtttccccggactgagtatcaataagctgctcgcgcggctgaaggagaaaacgttcgttatccggctaactacttcgagaaacctagtagcaccatgaaagttgcggagtgtttcgctcagcacttcccccgtgtagatcaggtcgatgagtcactgcattccccacgggcgaccgtggcagtggctgcgttggcggcctgcctatggggtaacccataggacgctctaatacggacatggtgcgaagagtcaattgagctagttagtagtcctccggcccctgaatgcggctaatcctaactgcggagcacataccctcaatccagggggcggtgtgtcgtaatgggcaactctgcagcggaaccgactactttgggtgtccgtgtttccttttattcttatattggctgcttatggtgacaattgagagattgttaccatatagctattggattggccatccggtgtccaacagagctctggtttacttgttcgttggctttatacctctgtcacccacagtttattcaactctagtgttcttaatacgccttaacagtaagag

SEQ ID NO: 23028 - DNA, 530 bp, synthetic construct
  source 1..530: mol_type = other DNA
ggctgaaggagaaaacgttcgttatccggctaactacttcgagaaacctagtagcaccatgaaagttgcggagtgtttcgctcagcacttcccccgtgtagatcaggtcgatgagtcactgcattccccacgggcgaccgtggcagtggctgcgttggcggcctgcctatggggtaacccataggacgctctaatacggacatggtgcgaagagtcaattgagctagttagtagtcctccggcccctgaatgcggctaatcctaactgcggagcacataccctcaatccagggggcggtgtgtcgtaatgggcaactctgcagcggaaccgactactttgggtgtccgtgtttccttttattcttatattggctgcttatggtgacaattgagagattgttaccatatagctattggattggccatccggtgtccaacagagctctggtttacttgttcgttggctttatacctctgtcacccacagtttattcaactctagtgttcttaatacgccttaacagtaagag

SEQ ID NO: 23029 - DNA, 680 bp, synthetic construct
  source 1..680: mol_type = other DNA
aatctttgtgcgcctgttttataaccccctccccaatttgtaacttagaagcaatgaaccccatcgatcaatagcaggcataacgcaccagttatgtctcgatcaagcacttctgttttcccggactgagtatcaatagactgcttgcgcggtcgaaggagaaaacgttcgttacccggctaactacctcgagaagcctagtagcaccactgaaactgcagagtgtttcgttcaacacttcccccgtgtagatcaggtcgatgagtcactgctctccccacgggtgaccgtggcagtggctgcgttggcggcctgcctatggggtaacccataggacgctctgaagtggacatggtgtgaagagcctattgagctagttagtagtcctccggcccctgaatgcggctaatcctaactgtggagcgcatgccctcaaaccagggggtggtgcgtcgtaacgggtaactccgcagcggaaccgactactttgggtgtccgtgtttccttttattatcctattggctgcttatggtgacaattaaagaattgttaccatatagctattggattggccatccggtgtgtaatagagcgattatctacctatttgttggatacattccgttaacattcaaatctctcaacacattatactacattctgaccttgaacacaagaaa

SEQ ID NO: 23030 - DNA, 630 bp, synthetic construct
  source 1..630: mol_type = other DNA
gcaatgaaccccatcgatcaatagcaggcataacgcaccagttatgtctcgatcaagcacttctgttttcccggactgagtatcaatagactgcttgcgcggtcgaaggagaaaacgttcgttacccggctaactacctcgagaagcctagtagcaccactgaaactgcagagtgtttcgttcaacacttcccccgtgtagatcaggtcgatgagtcactgctctccccacgggtgaccgtggcagtggctgcgttggcggcctgcctatggggtaacccataggacgctctgaagtggacatggtgtgaagagcctattgagctagttagtagtcctccggcccctgaatgcggctaatcctaactgtggagcgcatgccctcaaaccagggggtggtgcgtcgtaacgggtaactccgcagcggaaccgactactttgggtgtccgtgtttccttttattatcctattggctgcttatggtgacaattaaagaattgttaccatatagctattggattggccatccggtgtgtaatagagcgattatctacctatttgttggatacattccgttaacattcaaatctctcaacacattatactacattctgaccttgaacacaagaaa

SEQ ID NO: 23031 - DNA, 580 bp, synthetic construct
  source 1..580: mol_type = other DNA
gatcaagcacttctgttttcccggactgagtatcaatagactgcttgcgcggtcgaaggagaaaacgttcgttacccggctaactacctcgagaagcctagtagcaccactgaaactgcagagtgtttcgttcaacacttcccccgtgtagatcaggtcgatgagtcactgctctccccacgggtgaccgtggcagtggctgcgttggcggcctgcctatggggtaacccataggacgctctgaagtggacatggtgtgaagagcctattgagctagttagtagtcctccggcccctgaatgcggctaatcctaactgtggagcgcatgccctcaaaccagggggtggtgcgtcgtaacgggtaactccgcagcggaaccgactactttgggtgtccgtgtttccttttattatcctattggctgcttatggtgacaattaaagaattgttaccatatagctattggattggccatccggtgtgtaatagagcgattatctacctatttgttggatacattccgttaacattcaaatctctcaacacattatactacattctgaccttgaacacaagaaa

SEQ ID NO: 23032 - DNA, 530 bp, synthetic construct
  source 1..530: mol_type = other DNA
ggtcgaaggagaaaacgttcgttacccggctaactacctcgagaagcctagtagcaccactgaaactgcagagtgtttcgttcaacacttcccccgtgtagatcaggtcgatgagtcactgctctccccacgggtgaccgtggcagtggctgcgttggcggcctgcctatggggtaacccataggacgctctgaagtggacatggtgtgaagagcctattgagctagttagtagtcctccggcccctgaatgcggctaatcctaactgtggagcgcatgccctcaaaccagggggtggtgcgtcgtaacgggtaactccgcagcggaaccgactactttgggtgtccgtgtttccttttattatcctattggctgcttatggtgacaattaaagaattgttaccatatagctattggattggccatccggtgtgtaatagagcgattatctacctatttgttggatacattccgttaacattcaaatctctcaacacattatactacattctgaccttgaacacaagaaa

SEQ ID NO: 23033 - DNA, 681 bp, synthetic construct
  source 1..681: mol_type = other DNA
actctggtatctcggtacctttgtacgcctattttatatccccttccccctttgtaacttagaagaaataagcaaactgcccaatagcggcacaatacccaattgtgttacgggcaagcactcctgtttccccggaagggtctatcggtatgctgtacccacggcagaagtatgacctaccgttaaccggccatgtacttcgagaagcctagtaccaccatgaaggttgattgatgttacgttccccagcaaccccagctggtagttctggtcgatgagtctcggcatcccccacgggcgaccgtggccgaggctgcgctggcggccagcctacacctctttggtgtaggacgtcaagatattgacatggtgtgaagagcctattgagctacgtggtagtcctccggcccctgaatgcggctaatcctaactccggatcgtccgctggcaatcccgccagaagggcgtcgtaatgcgcaagtctggagcggaaccgactactttgggtgtccgtgtttcctgttttatttactgtttggctgcttatggtgacaacttatagttatcatcataagctacttggtcttgccaaccggagaataatttggttatttgttggttttacaaacctacaagagtcagtactcatcctattaattgttctaagaataaacacacaag

SEQ ID NO: 23034 - DNA, 631 bp, synthetic construct
  source 1..631: mol_type = other DNA
tttgtaacttagaagaaataagcaaactgcccaatagcggcacaatacccaattgtgttacgggcaagcactcctgtttccccggaagggtctatcggtatgctgtacccacggcagaagtatgacctaccgttaaccggccatgtacttcgagaagcctagtaccaccatgaaggttgattgatgttacgttccccagcaaccccagctggtagttctggtcgatgagtctcggcatcccccacgggcgaccgtggccgaggctgcgctggcggccagcctacacctctttggtgtaggacgtcaagatattgacatggtgtgaagagcctattgagctacgtggtagtcctccggcccctgaatgcggctaatcctaactccggatcgtccgctggcaatcccgccagaagggcgtcgtaatgcgcaagtctggagcggaaccgactactttgggtgtccgtgtttcctgttttatttactgtttggctgcttatggtgacaacttatagttatcatcataagctacttggtcttgccaaccggagaataatttggttatttgttggttttacaaacctacaagagtcagtactcatcctattaattgttctaagaataaacacacaag

SEQ ID NO: 23035 - DNA, 581 bp, synthetic construct
  source 1..581: mol_type = other DNA
aattgtgttacgggcaagcactcctgtttccccggaagggtctatcggtatgctgtacccacggcagaagtatgacctaccgttaaccggccatgtacttcgagaagcctagtaccaccatgaaggttgattgatgttacgttccccagcaaccccagctggtagttctggtcgatgagtctcggcatcccccacgggcgaccgtggccgaggctgcgctggcggccagcctacacctctttggtgtaggacgtcaagatattgacatggtgtgaagagcctattgagctacgtggtagtcctccggcccctgaatgcggctaatcctaactccggatcgtccgctggcaatcccgccagaagggcgtcgtaatgcgcaagtctggagcggaaccgactactttgggtgtccgtgtttcctgttttatttactgtttggctgcttatggtgacaacttatagttatcatcataagctacttggtcttgccaaccggagaataatttggttatttgttggttttacaaacctacaagagtcagtactcatcctattaattgttctaagaataaacacacaag

SEQ ID NO: 23036 - DNA, 531 bp, synthetic construct
  source 1..531: mol_type = other DNA
tgctgtacccacggcagaagtatgacctaccgttaaccggccatgtacttcgagaagcctagtaccaccatgaaggttgattgatgttacgttccccagcaaccccagctggtagttctggtcgatgagtctcggcatcccccacgggcgaccgtggccgaggctgcgctggcggccagcctacacctctttggtgtaggacgtcaagatattgacatggtgtgaagagcctattgagctacgtggtagtcctccggcccctgaatgcggctaatcctaactccggatcgtccgctggcaatcccgccagaagggcgtcgtaatgcgcaagtctggagcggaaccgactactttgggtgtccgtgtttcctgttttatttactgtttggctgcttatggtgacaacttatagttatcatcataagctacttggtcttgccaaccggagaataatttggttatttgttggttttacaaacctacaagagtcagtactcatcctattaattgttctaagaataaacacacaag

SEQ ID NO: 23037 - DNA, 682 bp, synthetic construct
  source 1..682: mol_type = other DNA
gtacaccggtattgcggtacccttgtacgcctgttttatactcccttttccctgtaacttagaagaaacaaaccaagttcaatagaagggggtacaaaccagtaccaccacgaacaagcacttctgtttccccggtgatgttgcatagactgtacccacggttgaaagcgattgatccgttacccgctcttgtacttcgagaagcctagtatcatcttggaatcttcgatgcgttgcgctcagcactcaaccccagagtgtagcttaggtcgatgagtctggacattcctcaccggcgacggtggtccaggctgcgttggcggcctacctgtggcccaaagccacaggacgctagttttgaacaaggtgtgaagagcctattgagctacatgagagtcctccggcccctgaatgcggctaatcccaaccacggagcaagggtgcacatgccagtgtataccttgtcgtaacgcgcaagtctgtggcggaaccgactactttgggtgtccgtgtttccttttatttttacattggctgcttatggtgacaatcgaagattgttatcataaagcgagttggattggccatccggtgaaagtaaagcatattatttacttggttgttgggattataccactcaatccttttactaacaatacgaggataaaacaacaatactaca

SEQ ID NO: 23038 - DNA, 632 bp, synthetic construct
  source 1..632: mol_type = other DNA
cctgtaacttagaagaaacaaaccaagttcaatagaagggggtacaaaccagtaccaccacgaacaagcacttctgtttccccggtgatgttgcatagactgtacccacggttgaaagcgattgatccgttacccgctcttgtacttcgagaagcctagtatcatcttggaatcttcgatgcgttgcgctcagcactcaaccccagagtgtagcttaggtcgatgagtctggacattcctcaccggcgacggtggtccaggctgcgttggcggcctacctgtggcccaaagccacaggacgctagttttgaacaaggtgtgaagagcctattgagctacatgagagtcctccggcccctgaatgcggctaatcccaaccacggagcaagggtgcacatgccagtgtataccttgtcgtaacgcgcaagtctgtggcggaaccgactactttgggtgtccgtgtttccttttatttttacattggctgcttatggtgacaatcgaagattgttatcataaagcgagttggattggccatccggtgaaagtaaagcatattatttacttggttgttgggattataccactcaatccttttactaacaatacgaggataaaacaacaatactaca

SEQ ID NO: 23039 - DNA, 582 bp, synthetic construct
  source 1..582: mol_type = other DNA
agtaccaccacgaacaagcacttctgtttccccggtgatgttgcatagactgtacccacggttgaaagcgattgatccgttacccgctcttgtacttcgagaagcctagtatcatcttggaatcttcgatgcgttgcgctcagcactcaaccccagagtgtagcttaggtcgatgagtctggacattcctcaccggcgacggtggtccaggctgcgttggcggcctacctgtggcccaaagccacaggacgctagttttgaacaaggtgtgaagagcctattgagctacatgagagtcctccggcccctgaatgcggctaatcccaaccacggagcaagggtgcacatgccagtgtataccttgtcgtaacgcgcaagtctgtggcggaaccgactactttgggtgtccgtgtttccttttatttttacattggctgcttatggtgacaatcgaagattgttatcataaagcgagttggattggccatccggtgaaagtaaagcatattatttacttggttgttgggattataccactcaatccttttactaacaatacgaggataaaacaacaatactaca

SEQ ID NO: 23040 - DNA, 532 bp, synthetic construct
  source 1..532: mol_type = other DNA
tgtacccacggttgaaagcgattgatccgttacccgctcttgtacttcgagaagcctagtatcatcttggaatcttcgatgcgttgcgctcagcactcaaccccagagtgtagcttaggtcgatgagtctggacattcctcaccggcgacggtggtccaggctgcgttggcggcctacctgtggcccaaagccacaggacgctagttttgaacaaggtgtgaagagcctattgagctacatgagagtcctccggcccctgaatgcggctaatcccaaccacggagcaagggtgcacatgccagtgtataccttgtcgtaacgcgcaagtctgtggcggaaccgactactttgggtgtccgtgtttccttttatttttacattggctgcttatggtgacaatcgaagattgttatcataaagcgagttggattggccatccggtgaaagtaaagcatattatttacttggttgttgggattataccactcaatccttttactaacaatacgaggataaaacaacaatactaca

SEQ ID NO: 23041 - DNA, 682 bp, synthetic construct
  source 1..682: mol_type = other DNA
caaggtacctttgtacgcctgttttataccccctccccgatccgaaacttagaagtaaagcaaacccgatcaatagtaggtgcgacactccagtcgtatctcgatcaagcacttctgtttccccggactgagtatcaatagactgcccacgcggttgaaggagaaaacgtccgtcatccggctaactacttcgagaaacccagtagcaccatggaagttgcagagtgtttcgctcagcactaaccccgtgtagatcaggctgatgagtcaccgcattccccacgggtgaccgtggcggtggctgcgttggcggcctgcctatggggcaacccataggacgctctaatacggacatggtgtgaagagtctattgagctagttagtaatcctccggcccctgaatgcggctaatcctaactgcggagcacatactcctactccaaggagcagtgtgtcgtaacgggcaactctgcagcggaaccgactactttgggtgtccgtgtttcctattaacatatcactggctgcttatggtgacaattgaaagattgttaccatatagctattggattggccatccggtgtcaaacagagcaatagtgtacctattcgctgggtttatcccattgactgttaaagatatacaaactctctacttgataatacaactaaacactgtaaa

SEQ ID NO: 23042 - DNA, 632 bp, synthetic construct
  source 1..632: mol_type = other DNA
agaagtaaagcaaacccgatcaatagtaggtgcgacactccagtcgtatctcgatcaagcacttctgtttccccggactgagtatcaatagactgcccacgcggttgaaggagaaaacgtccgtcatccggctaactacttcgagaaacccagtagcaccatggaagttgcagagtgtttcgctcagcactaaccccgtgtagatcaggctgatgagtcaccgcattccccacgggtgaccgtggcggtggctgcgttggcggcctgcctatggggcaacccataggacgctctaatacggacatggtgtgaagagtctattgagctagttagtaatcctccggcccctgaatgcggctaatcctaactgcggagcacatactcctactccaaggagcagtgtgtcgtaacgggcaactctgcagcggaaccgactactttgggtgtccgtgtttcctattaacatatcactggctgcttatggtgacaattgaaagattgttaccatatagctattggattggccatccggtgtcaaacagagcaatagtgtacctattcgctgggtttatcccattgactgttaaagatatacaaactctctacttgataatacaactaaacactgtaaa

SEQ ID NO: 23043 - DNA, 582 bp, synthetic construct
  source 1..582: mol_type = other DNA
tcgatcaagcacttctgtttccccggactgagtatcaatagactgcccacgcggttgaaggagaaaacgtccgtcatccggctaactacttcgagaaacccagtagcaccatggaagttgcagagtgtttcgctcagcactaaccccgtgtagatcaggctgatgagtcaccgcattccccacgggtgaccgtggcggtggctgcgttggcggcctgcctatggggcaacccataggacgctctaatacggacatggtgtgaagagtctattgagctagttagtaatcctccggcccctgaatgcggctaatcctaactgcggagcacatactcctactccaaggagcagtgtgtcgtaacgggcaactctgcagcggaaccgactactttgggtgtccgtgtttcctattaacatatcactggctgcttatggtgacaattgaaagattgttaccatatagctattggattggccatccggtgtcaaacagagcaatagtgtacctattcgctgggtttatcccattgactgttaaagatatacaaactctctacttgataatacaactaaacactgtaaa

SEQ ID NO: 23044 - DNA, 532 bp, synthetic construct
  source 1..532: mol_type = other DNA
gcggttgaaggagaaaacgtccgtcatccggctaactacttcgagaaacccagtagcaccatggaagttgcagagtgtttcgctcagcactaaccccgtgtagatcaggctgatgagtcaccgcattccccacgggtgaccgtggcggtggctgcgttggcggcctgcctatggggcaacccataggacgctctaatacggacatggtgtgaagagtctattgagctagttagtaatcctccggcccctgaatgcggctaatcctaactgcggagcacatactcctactccaaggagcagtgtgtcgtaacgggcaactctgcagcggaaccgactactttgggtgtccgtgtttcctattaacatatcactggctgcttatggtgacaattgaaagattgttaccatatagctattggattggccatccggtgtcaaacagagcaatagtgtacctattcgctgggtttatcccattgactgttaaagatatacaaactctctacttgataatacaactaaacactgtaaa

SEQ ID NO: 23045 - DNA, 682 bp, synthetic construct
  source 1..682: mol_type = other DNA
ttgcggtacctttgtgcgcctgttttatccaccctttccccatagtaacttagaagtacgttcaaatggtcaataggcggctcagtataccaactgagtctcgaccaagcacttctgttaccccggaccgagtatcaataagctactcacgtggctgaaggagaaaacgttcgttacccggccaactacttcgagaaacctagtaccaccatggatgttgcgcggcgtttcgctccgcactaccccagtgtagatcaggtcgatgagtcaccgcattcctcacgggcgaccgtggtggtggctgcgctggcggcctgcccatggggcaacccatgggacgcttcaatacagacatggtgtgaagagtctattgagctagttggtagtcctccggcccctgaatgcggctaatcctaactgcggagcagatccccacacaccagtgggcagtctgtcgtaatgggtaactctgcagcggaaccgactactttgggtgtccgtgtttccttttattcttatactggctgcttatggtgacaattgaaagattgttaccatatagctattggattggccatccagtgtctaacagagcaataatctatctttttgttggattcgtcccacttgactacagagcacttgcaacgctcaattacattatagatctcaacacaacgaa

SEQ ID NO: 23046 - DNA, 632 bp, synthetic construct
  source 1..632: mol_type = other DNA
tagaagtacgttcaaatggtcaataggcggctcagtataccaactgagtctcgaccaagcacttctgttaccccggaccgagtatcaataagctactcacgtggctgaaggagaaaacgttcgttacccggccaactacttcgagaaacctagtaccaccatggatgttgcgcggcgtttcgctccgcactaccccagtgtagatcaggtcgatgagtcaccgcattcctcacgggcgaccgtggtggtggctgcgctggcggcctgcccatggggcaacccatgggacgcttcaatacagacatggtgtgaagagtctattgagctagttggtagtcctccggcccctgaatgcggctaatcctaactgcggagcagatccccacacaccagtgggcagtctgtcgtaatgggtaactctgcagcggaaccgactactttgggtgtccgtgtttccttttattcttatactggctgcttatggtgacaattgaaagattgttaccatatagctattggattggccatccagtgtctaacagagcaataatctatctttttgttggattcgtcccacttgactacagagcacttgcaacgctcaattacattatagatctcaacacaacgaa

SEQ ID NO: 23047 - DNA, 582 bp, synthetic construct
  source 1..582: mol_type = other DNA
tcgaccaagcacttctgttaccccggaccgagtatcaataagctactcacgtggctgaaggagaaaacgttcgttacccggccaactacttcgagaaacctagtaccaccatggatgttgcgcggcgtttcgctccgcactaccccagtgtagatcaggtcgatgagtcaccgcattcctcacgggcgaccgtggtggtggctgcgctggcggcctgcccatggggcaacccatgggacgcttcaatacagacatggtgtgaagagtctattgagctagttggtagtcctccggcccctgaatgcggctaatcctaactgcggagcagatccccacacaccagtgggcagtctgtcgtaatgggtaactctgcagcggaaccgactactttgggtgtccgtgtttccttttattcttatactggctgcttatggtgacaattgaaagattgttaccatatagctattggattggccatccagtgtctaacagagcaataatctatctttttgttggattcgtcccacttgactacagagcacttgcaacgctcaattacattatagatctcaacacaacgaa

SEQ ID NO: 23048 - DNA, 532 bp, synthetic construct
  source 1..532: mol_type = other DNA
gtggctgaaggagaaaacgttcgttacccggccaactacttcgagaaacctagtaccaccatggatgttgcgcggcgtttcgctccgcactaccccagtgtagatcaggtcgatgagtcaccgcattcctcacgggcgaccgtggtggtggctgcgctggcggcctgcccatggggcaacccatgggacgcttcaatacagacatggtgtgaagagtctattgagctagttggtagtcctccggcccctgaatgcggctaatcctaactgcggagcagatccccacacaccagtgggcagtctgtcgtaatgggtaactctgcagcggaaccgactactttgggtgtccgtgtttccttttattcttatactggctgcttatggtgacaattgaaagattgttaccatatagctattggattggccatccagtgtctaacagagcaataatctatctttttgttggattcgtcccacttgactacagagcacttgcaacgctcaattacattatagatctcaacacaacgaa

SEQ ID NO: 23049 - DNA, 683 bp, synthetic construct
  source 1..683: mol_type = other DNA
aatctttgtgcgcctgttttataaccccttccccaacttgaaacgtagaagcaatacacataaccgatcaatagcaggcgtgacgcaccagtctcgtctcgatcaagcacttctgtttccccggaccgagtaacaatagactgctaacgcggttgaaggtgaaaacgttcgttatccggctaactacttcgagaagcccagtaacactatgaaagctgcggagcgttacgttcagcactcccccccgtgtagttcaggccgatgagtcactgcgatccctacgggcgaccgtagcagtggctgcgctggcggcctgcctatggggcaacccataggacgctctaaagtggacatggtgcgaagagctaattgagctagttagtagtcctccggcccctgaatgcggctaatcctaactgcggagcgcacgcctccaacccagggggtggtgcgtcgtaacgggcaactctgcagcggaaccgactactttgggtgtccgtgtttccttttattcttatattggctgcttatggtgacaatcacagagttgttaccatatagctattggattggccatccggtgtgcaacagagctatcatttatctatttataggttttgtaccattaactttgagatctacgaccaccctagagtacatattggttttaaattcaattagac

SEQ ID NO: 23050 - DNA, 633 bp, synthetic construct
  source 1..633: mol_type = other DNA
gcaatacacataaccgatcaatagcaggcgtgacgcaccagtctcgtctcgatcaagcacttctgtttccccggaccgagtaacaatagactgctaacgcggttgaaggtgaaaacgttcgttatccggctaactacttcgagaagcccagtaacactatgaaagctgcggagcgttacgttcagcactcccccccgtgtagttcaggccgatgagtcactgcgatccctacgggcgaccgtagcagtggctgcgctggcggcctgcctatggggcaacccataggacgctctaaagtggacatggtgcgaagagctaattgagctagttagtagtcctccggcccctgaatgcggctaatcctaactgcggagcgcacgcctccaacccagggggtggtgcgtcgtaacgggcaactctgcagcggaaccgactactttgggtgtccgtgtttccttttattcttatattggctgcttatggtgacaatcacagagttgttaccatatagctattggattggccatccggtgtgcaacagagctatcatttatctatttataggttttgtaccattaactttgagatctacgaccaccctagagtacatattggttttaaattcaattagac

SEQ ID NO: 23051 - DNA, 583 bp, synthetic construct
  source 1..583: mol_type = other DNA
gatcaagcacttctgtttccccggaccgagtaacaatagactgctaacgcggttgaaggtgaaaacgttcgttatccggctaactacttcgagaagcccagtaacactatgaaagctgcggagcgttacgttcagcactcccccccgtgtagttcaggccgatgagtcactgcgatccctacgggcgaccgtagcagtggctgcgctggcggcctgcctatggggcaacccataggacgctctaaagtggacatggtgcgaagagctaattgagctagttagtagtcctccggcccctgaatgcggctaatcctaactgcggagcgcacgcctccaacccagggggtggtgcgtcgtaacgggcaactctgcagcggaaccgactactttgggtgtccgtgtttccttttattcttatattggctgcttatggtgacaatcacagagttgttaccatatagctattggattggccatccggtgtgcaacagagctatcatttatctatttataggttttgtaccattaactttgagatctacgaccaccctagagtacatattggttttaaattcaattagac

SEQ ID NO: 23052 - DNA, 533 bp, synthetic construct
  source 1..533: mol_type = other DNA
ggttgaaggtgaaaacgttcgttatccggctaactacttcgagaagcccagtaacactatgaaagctgcggagcgttacgttcagcactcccccccgtgtagttcaggccgatgagtcactgcgatccctacgggcgaccgtagcagtggctgcgctggcggcctgcctatggggcaacccataggacgctctaaagtggacatggtgcgaagagctaattgagctagttagtagtcctccggcccctgaatgcggctaatcctaactgcggagcgcacgcctccaacccagggggtggtgcgtcgtaacgggcaactctgcagcggaaccgactactttgggtgtccgtgtttccttttattcttatattggctgcttatggtgacaatcacagagttgttaccatatagctattggattggccatccggtgtgcaacagagctatcatttatctatttataggttttgtaccattaactttgagatctacgaccaccctagagtacatattggttttaaattcaattagac

SEQ ID NO: 23053 - DNA, 683 bp, synthetic construct
  source 1..683: mol_type = other DNA
ccacggaatctttgtgcgcctgttttacaaccctccccaatttgtaacgtagaagcaatacacactactgatcaatagtaggcatggcgcgccagtcatgtcatgatcaagcacttctgttccccggactgagtatcaatagactgctcacgcggttgaaggagaaaacgttcgttacccggctaactacttcaagaaacctagtagcaccatggaagctgcggagtgtttcgctcagcacttcccccgtgtagatcaggtcgatgagtcactgcaatccccacgggcgaccgtggcagtggctgcgttggcggcctgcctatggggtaacccataggacgctctaatgtggacatggtgcgaagagtctattgagctagttagtagtcctccggcccctgaatgcggctaatcctaactgcggagcacatgccttcaacccaggaggtggtgtgtcgtaacgggtaactctgcagcggaaccgactactttgggtgtccgtgtttccttttatccttatattggctgcttatggtgacaatcacggaattgttgccatatagctattggattggccatccggtgtctaacagagctattgtatacctatttgttggatttgtaccactaaattacaaggttttaaacactctcaaccttataatactactcaactcagcaaa

SEQ ID NO: 23054 - DNA, 633 bp, synthetic construct
  source 1..633: mol_type = other DNA
agaagcaatacacactactgatcaatagtaggcatggcgcgccagtcatgtcatgatcaagcacttctgttccccggactgagtatcaatagactgctcacgcggttgaaggagaaaacgttcgttacccggctaactacttcaagaaacctagtagcaccatggaagctgcggagtgtttcgctcagcacttcccccgtgtagatcaggtcgatgagtcactgcaatccccacgggcgaccgtggcagtggctgcgttggcggcctgcctatggggtaacccataggacgctctaatgtggacatggtgcgaagagtctattgagctagttagtagtcctccggcccctgaatgcggctaatcctaactgcggagcacatgccttcaacccaggaggtggtgtgtcgtaacgggtaactctgcagcggaaccgactactttgggtgtccgtgtttccttttatccttatattggctgcttatggtgacaatcacggaattgttgccatatagctattggattggccatccggtgtctaacagagctattgtatacctatttgttggatttgtaccactaaattacaaggttttaaacactctcaaccttataatactactcaactcagcaaa

SEQ ID NO: 23055 - DNA, 583 bp, synthetic construct
  source 1..583: mol_type = other DNA
tcatgatcaagcacttctgttccccggactgagtatcaatagactgctcacgcggttgaaggagaaaacgttcgttacccggctaactacttcaagaaacctagtagcaccatggaagctgcggagtgtttcgctcagcacttcccccgtgtagatcaggtcgatgagtcactgcaatccccacgggcgaccgtggcagtggctgcgttggcggcctgcctatggggtaacccataggacgctctaatgtggacatggtgcgaagagtctattgagctagttagtagtcctccggcccctgaatgcggctaatcctaactgcggagcacatgccttcaacccaggaggtggtgtgtcgtaacgggtaactctgcagcggaaccgactactttgggtgtccgtgtttccttttatccttatattggctgcttatggtgacaatcacggaattgttgccatatagctattggattggccatccggtgtctaacagagctattgtatacctatttgttggatttgtaccactaaattacaaggttttaaacactctcaaccttataatactactcaactcagcaaa

SEQ ID NO: 23056 - DNA, 533 bp, synthetic construct
  source 1..533: mol_type = other DNA
cgcggttgaaggagaaaacgttcgttacccggctaactacttcaagaaacctagtagcaccatggaagctgcggagtgtttcgctcagcacttcccccgtgtagatcaggtcgatgagtcactgcaatccccacgggcgaccgtggcagtggctgcgttggcggcctgcctatggggtaacccataggacgctctaatgtggacatggtgcgaagagtctattgagctagttagtagtcctccggcccctgaatgcggctaatcctaactgcggagcacatgccttcaacccaggaggtggtgtgtcgtaacgggtaactctgcagcggaaccgactactttgggtgtccgtgtttccttttatccttatattggctgcttatggtgacaatcacggaattgttgccatatagctattggattggccatccggtgtctaacagagctattgtatacctatttgttggatttgtaccactaaattacaaggttttaaacactctcaaccttataatactactcaactcagcaaa

SEQ ID NO: 23057 - DNA, 683 bp, synthetic construct
  source 1..683: mol_type = other DNA
gtactctggtatctcggtacctttgtacgcctgttttaattccctccccaacgtaacttagaagcttttaaaccaaagctcaataggcggagcgcaaaccagcgctcttatgagcaagcacttctgtctccccggtgtggttgtatagactgtccccacggttgaaaacaacttatccgttaaccgctatagtacttcgagaaacctagtattgccttcggagtgtcgatgcgttgcgctcagcacactaacccgtgtgtagcttgggtcgatgagtctggacgtaccccactggcgacagtggtccaggctgcgttggcggcctactcgtggtgaaaaccatgagacgctagacatgaacaaggtgtgaagagtctattgagctactatagagtcctccggcccctgaatgcggctaatcctaaccatggagcaagtgctcacaaaccagtgggttacttgtcgtaatgcgcaagtccgtggcggaaccgactactttgggtgtccgtgtttcactttttacttttatgactgctaatggtgacaatttaatattgttaccatttggcttgtcgaattgatcacataagatctatagttttgttcactgatttgctttcaaataatctcacctcaaaacctccagtacataacatttaaagagtttaaacttatttataaca

SEQ ID NO: 23058 - DNA, 633 bp, synthetic construct
  source 1..633: mol_type = other DNA
acgtaacttagaagcttttaaaccaaagctcaataggcggagcgcaaaccagcgctcttatgagcaagcacttctgtctccccggtgtggttgtatagactgtccccacggttgaaaacaacttatccgttaaccgctatagtacttcgagaaacctagtattgccttcggagtgtcgatgcgttgcgctcagcacactaacccgtgtgtagcttgggtcgatgagtctggacgtaccccactggcgacagtggtccaggctgcgttggcggcctactcgtggtgaaaaccatgagacgctagacatgaacaaggtgtgaagagtctattgagctactatagagtcctccggcccctgaatgcggctaatcctaaccatggagcaagtgctcacaaaccagtgggttacttgtcgtaatgcgcaagtccgtggcggaaccgactactttgggtgtccgtgtttcactttttacttttatgactgctaatggtgacaatttaatattgttaccatttggcttgtcgaattgatcacataagatctatagttttgttcactgatttgctttcaaataatctcacctcaaaacctccagtacataacatttaaagagtttaaacttatttataaca

SEQ ID NO: 23059 - DNA, 583 bp, synthetic construct
  source 1..583: mol_type = other DNA
agcgctcttatgagcaagcacttctgtctccccggtgtggttgtatagactgtccccacggttgaaaacaacttatccgttaaccgctatagtacttcgagaaacctagtattgccttcggagtgtcgatgcgttgcgctcagcacactaacccgtgtgtagcttgggtcgatgagtctggacgtaccccactggcgacagtggtccaggctgcgttggcggcctactcgtggtgaaaaccatgagacgctagacatgaacaaggtgtgaagagtctattgagctactatagagtcctccggcccctgaatgcggctaatcctaaccatggagcaagtgctcacaaaccagtgggttacttgtcgtaatgcgcaagtccgtggcggaaccgactactttgggtgtccgtgtttcactttttacttttatgactgctaatggtgacaatttaatattgttaccatttggcttgtcgaattgatcacataagatctatagttttgttcactgatttgctttcaaataatctcacctcaaaacctccagtacataacatttaaagagtttaaacttatttataaca

SEQ ID NO: 23060 - DNA, 533 bp, synthetic construct
  source 1..533: mol_type = other DNA
tgtccccacggttgaaaacaacttatccgttaaccgctatagtacttcgagaaacctagtattgccttcggagtgtcgatgcgttgcgctcagcacactaacccgtgtgtagcttgggtcgatgagtctggacgtaccccactggcgacagtggtccaggctgcgttggcggcctactcgtggtgaaaaccatgagacgctagacatgaacaaggtgtgaagagtctattgagctactatagagtcctccggcccctgaatgcggctaatcctaaccatggagcaagtgctcacaaaccagtgggttacttgtcgtaatgcgcaagtccgtggcggaaccgactactttgggtgtccgtgtttcactttttacttttatgactgctaatggtgacaatttaatattgttaccatttggcttgtcgaattgatcacataagatctatagttttgttcactgatttgctttcaaataatctcacctcaaaacctccagtacataacatttaaagagtttaaacttatttataaca

SEQ ID NO: 23061 - DNA, 684 bp, synthetic construct
  source 1..684: mol_type = other DNA
caccacggtacctttgtgcgcctgttttatcaccctaccccattcggaacttagaagcaatacacaaccgaccaatagtgggtgtggcacaccagccgcatcttggtcaagtacttctgtttccccgggttgagtatcaataagctgctcacacggctgaaggagaaaacacccgtcacccggccaactacttcgagaaacctagtaccactatgaatgttgcaaggcgtttcgctcagcacttcccccgtgtagatcaggtcgatgagtcaccgcattccccacgggcgaccgtggcggtggctgcgttggcggcctgcctatgggttaacccatgggacgccttaatactgacatggtgcgaagagtctattgagctagttggtagtcctccggcccctgaatgcggctaatcctaactgcggagcacatactcacaagccagtgagcggtgtgtcgtaacgggtaactctgcagcggaaccgactactttgggagtccgtgtttccttttatccttatattggctgcttatggtgacaattggagaattgttaccatatagctattggattggccatccggtgtctaatagagctattatatacctatttgttggatttactccactaacacacaaatccctaaacactttgtgctttatcttaaacttaaatacacgaaa

SEQ ID NO: 23062 - DNA, 634 bp, synthetic construct
  source 1..634: mol_type = other DNA
ttagaagcaatacacaaccgaccaatagtgggtgtggcacaccagccgcatcttggtcaagtacttctgtttccccgggttgagtatcaataagctgctcacacggctgaaggagaaaacacccgtcacccggccaactacttcgagaaacctagtaccactatgaatgttgcaaggcgtttcgctcagcacttcccccgtgtagatcaggtcgatgagtcaccgcattccccacgggcgaccgtggcggtggctgcgttggcggcctgcctatgggttaacccatgggacgccttaatactgacatggtgcgaagagtctattgagctagttggtagtcctccggcccctgaatgcggctaatcctaactgcggagcacatactcacaagccagtgagcggtgtgtcgtaacgggtaactctgcagcggaaccgactactttgggagtccgtgtttccttttatccttatattggctgcttatggtgacaattggagaattgttaccatatagctattggattggccatccggtgtctaatagagctattatatacctatttgttggatttactccactaacacacaaatccctaaacactttgtgctttatcttaaacttaaatacacgaaa

SEQ ID NO: 23063 - DNA, 584 bp, synthetic construct
  source 1..584: mol_type = other DNA
tcttggtcaagtacttctgtttccccgggttgagtatcaataagctgctcacacggctgaaggagaaaacacccgtcacccggccaactacttcgagaaacctagtaccactatgaatgttgcaaggcgtttcgctcagcacttcccccgtgtagatcaggtcgatgagtcaccgcattccccacgggcgaccgtggcggtggctgcgttggcggcctgcctatgggttaacccatgggacgccttaatactgacatggtgcgaagagtctattgagctagttggtagtcctccggcccctgaatgcggctaatcctaactgcggagcacatactcacaagccagtgagcggtgtgtcgtaacgggtaactctgcagcggaaccgactactttgggagtccgtgtttccttttatccttatattggctgcttatggtgacaattggagaattgttaccatatagctattggattggccatccggtgtctaatagagctattatatacctatttgttggatttactccactaacacacaaatccctaaacactttgtgctttatcttaaacttaaatacacgaaa

SEQ ID NO: 23064 - DNA, 534 bp, synthetic construct
  source 1..534: mol_type = other DNA
acacggctgaaggagaaaacacccgtcacccggccaactacttcgagaaacctagtaccactatgaatgttgcaaggcgtttcgctcagcacttcccccgtgtagatcaggtcgatgagtcaccgcattccccacgggcgaccgtggcggtggctgcgttggcggcctgcctatgggttaacccatgggacgccttaatactgacatggtgcgaagagtctattgagctagttggtagtcctccggcccctgaatgcggctaatcctaactgcggagcacatactcacaagccagtgagcggtgtgtcgtaacgggtaactctgcagcggaaccgactactttgggagtccgtgtttccttttatccttatattggctgcttatggtgacaattggagaattgttaccatatagctattggattggccatccggtgtctaatagagctattatatacctatttgttggatttactccactaacacacaaatccctaaacactttgtgctttatcttaaacttaaatacacgaaa

SEQ ID NO: 23065 - DNA, 684 bp, synthetic construct
  source 1..684: mol_type = other DNA
cacggtacccttgtacgcctgttttatacccccttcccccgtaacttagaagcaataatccaagttcaatagaagggggtacaaaccagtaccaccacgaacaagcacttctgttaccccggtgaagttgtatagactgtgcccacggttgaaagcgaccgatccgttatccgctcttgtacttcgagaagcccagtatcatcttggaatcttcgatgcgttgcgctcagcactcaaccccagagtgtagcttaggtcgatgagtctggacggtcctcaccggtgacggtggtccaggctgcgttggcggcctacctgtggtccaaagccacaggacgctagttgtgaacaaggtgtgaagagcctattgagctacatgagagtcctccggcccctgaatgcggctaatcctaaccacggagcaagtgctcacaacccagtgagtggcttgtcgtaacgagcaattctgtggcggaaccgactactttgggtgtccgtgtttcctttattttattatatggctgcttatggtgacaatcattgattgttatcataaagcgagttggattggccatccggtgaaagtaaagcacattatttatctttttgttggatttactccattgagtgtttttactccagacgtgattcgagcagtcttattgattagaagcatctgccaca

SEQ ID NO: 23066 - DNA, 634 bp, synthetic construct
  source 1..634: mol_type = other DNA
agcaataatccaagttcaatagaagggggtacaaaccagtaccaccacgaacaagcacttctgttaccccggtgaagttgtatagactgtgcccacggttgaaagcgaccgatccgttatccgctcttgtacttcgagaagcccagtatcatcttggaatcttcgatgcgttgcgctcagcactcaaccccagagtgtagcttaggtcgatgagtctggacggtcctcaccggtgacggtggtccaggctgcgttggcggcctacctgtggtccaaagccacaggacgctagttgtgaacaaggtgtgaagagcctattgagctacatgagagtcctccggcccctgaatgcggctaatcctaaccacggagcaagtgctcacaacccagtgagtggcttgtcgtaacgagcaattctgtggcggaaccgactactttgggtgtccgtgtttcctttattttattatatggctgcttatggtgacaatcattgattgttatcataaagcgagttggattggccatccggtgaaagtaaagcacattatttatctttttgttggatttactccattgagtgtttttactccagacgtgattcgagcagtcttattgattagaagcatctgccaca

SEQ ID NO: 23067 - DNA, 584 bp, synthetic construct
  source 1..584: mol_type = other DNA
acaagcacttctgttaccccggtgaagttgtatagactgtgcccacggttgaaagcgaccgatccgttatccgctcttgtacttcgagaagcccagtatcatcttggaatcttcgatgcgttgcgctcagcactcaaccccagagtgtagcttaggtcgatgagtctggacggtcctcaccggtgacggtggtccaggctgcgttggcggcctacctgtggtccaaagccacaggacgctagttgtgaacaaggtgtgaagagcctattgagctacatgagagtcctccggcccctgaatgcggctaatcctaaccacggagcaagtgctcacaacccagtgagtggcttgtcgtaacgagcaattctgtggcggaaccgactactttgggtgtccgtgtttcctttattttattatatggctgcttatggtgacaatcattgattgttatcataaagcgagttggattggccatccggtgaaagtaaagcacattatttatctttttgttggatttactccattgagtgtttttactccagacgtgattcgagcagtcttattgattagaagcatctgccaca

SEQ ID NO: 23068 - DNA, 534 bp, synthetic construct
  source 1..534: mol_type = other DNA
gaaagcgaccgatccgttatccgctcttgtacttcgagaagcccagtatcatcttggaatcttcgatgcgttgcgctcagcactcaaccccagagtgtagcttaggtcgatgagtctggacggtcctcaccggtgacggtggtccaggctgcgttggcggcctacctgtggtccaaagccacaggacgctagttgtgaacaaggtgtgaagagcctattgagctacatgagagtcctccggcccctgaatgcggctaatcctaaccacggagcaagtgctcacaacccagtgagtggcttgtcgtaacgagcaattctgtggcggaaccgactactttgggtgtccgtgtttcctttattttattatatggctgcttatggtgacaatcattgattgttatcataaagcgagttggattggccatccggtgaaagtaaagcacattatttatctttttgttggatttactccattgagtgtttttactccagacgtgattcgagcagtcttattgattagaagcatctgccaca

SEQ ID NO: 23069 - DNA, 684 bp, synthetic construct
  source 1..684: mol_type = other DNA
tattccggtacctttgtgcgcctgttttatccaccctccccaatgtaacgtagaagctacgctcaaacggtcaacagatagtccagtaatccagctgggccacgaccaagcacttctgtttccccggacagagtaccaataagctgctcgcgcggctgaaggggaaaacgttcgttacccggccaattacttcgagaaacctagtaccgccatggacgttgcgcagcgtttcgctccacacaaccccagtgtagatcaggtcgatgagccaccgcattccccacgggcgaccgtggcggtggctgcgttggcggcctgcccatggggtaacccatgggacgcttcaatacagacatggtgcgaagagtctattgagctaattggtagtcctccggcccctgaatgcggctaatcctaactgcggagcaggtacccacaacccagtgggtcacctgtcgtaatgggcaactctgcagcggaaccgactactttgggtgtccgtgtttccttttaacctttacactggctgcttatggtgacaattgaaagattgttaccatatagctattggattggccatcctgtgagtaatagagcgattgtatacttatttgttggctttataccactcaatttgaaagctttacagacactgaattatattgtggcattaaacacagcaaa

SEQ ID NO: 23070 - DNA, 634 bp, synthetic construct; identical to SEQ ID NO: 21604
  source 1..634: mol_type = other DNA

SEQ ID NO: 23071 - DNA, 584 bp, synthetic construct
  source 1..584: mol_type = other DNA
cacgaccaagcacttctgtttccccggacagagtaccaataagctgctcgcgcggctgaaggggaaaacgttcgttacccggccaattacttcgagaaacctagtaccgccatggacgttgcgcagcgtttcgctccacacaaccccagtgtagatcaggtcgatgagccaccgcattccccacgggcgaccgtggcggtggctgcgttggcggcctgcccatggggtaacccatgggacgcttcaatacagacatggtgcgaagagtctattgagctaattggtagtcctccggcccctgaatgcggctaatcctaactgcggagcaggtacccacaacccagtgggtcacctgtcgtaatgggcaactctgcagcggaaccgactactttgggtgtccgtgtttccttttaacctttacactggctgcttatggtgacaattgaaagattgttaccatatagctattggattggccatcctgtgagtaatagagcgattgtatacttatttgttggctttataccactcaatttgaaagctttacagacactgaattatattgtggcattaaacacagcaaa

SEQ ID NO: 23072 - DNA, 534 bp, synthetic construct
  source 1..534: mol_type = other DNA
cgcggctgaaggggaaaacgttcgttacccggccaattacttcgagaaacctagtaccgccatggacgttgcgcagcgtttcgctccacacaaccccagtgtagatcaggtcgatgagccaccgcattccccacgggcgaccgtggcggtggctgcgttggcggcctgcccatggggtaacccatgggacgcttcaatacagacatggtgcgaagagtctattgagctaattggtagtcctccggcccctgaatgcggctaatcctaactgcggagcaggtacccacaacccagtgggtcacctgtcgtaatgggcaactctgcagcggaaccgactactttgggtgtccgtgtttccttttaacctttacactggctgcttatggtgacaattgaaagattgttaccatatagctattggattggccatcctgtgagtaatagagcgattgtatacttatttgttggctttataccactcaatttgaaagctttacagacactgaattatattgtggcattaaacacagcaaa

SEQ ID NO: 23073 - DNA, 684 bp, synthetic construct
  source 1..684: mol_type = other DNA
atcaaggtacctttgtgcgcctgttttatagccccttccccgaatgtaacgtagaagctgaacccaagcggtcaacaggcggctcagaacaccatctgggtcttgaccaagcacttctgttaccccggactgagtatcaataagctgctcacgcggctgaaggagaaaatgttcgttatccggccaattacttcgagaaacctagtaccaccatgaaggttgcgcagtgtttcgctccgcacaatcccagtgtagatcaggtcgatgagtcaccgcgttcctcacgggcgaccgtggcggtggctgcgctggcggcctgcccatggggcaacccatgggacgcttcaatactgacatggtgcgaagagtcaattgagctaattggtagtcctccggcccctgaatgcggctaatcctaactgcggagcagatgcccaagctccagtgggtagtctgtcgtaacgggtaactctgcagcggaaccgactactttgggtgtccgtgtttccttttattcttacattggctgcttatggtgacaattgagaaattgttgccatatagctattggattggccatccggtgacgaatagagcaattgtgtatctttttgttggattcataccactagataatacaaacttcaaaaccttgtgttacatcattaggttaaacacagcaag

SEQ ID NO: 23074 - DNA, 634 bp, synthetic construct
  source 1..634: mol_type = other DNA
gtagaagctgaacccaagcggtcaacaggcggctcagaacaccatctgggtcttgaccaagcacttctgttaccccggactgagtatcaataagctgctcacgcggctgaaggagaaaatgttcgttatccggccaattacttcgagaaacctagtaccaccatgaaggttgcgcagtgtttcgctccgcacaatcccagtgtagatcaggtcgatgagtcaccgcgttcctcacgggcgaccgtggcggtggctgcgctggcggcctgcccatggggcaacccatgggacgcttcaatactgacatggtgcgaagagtcaattgagctaattggtagtcctccggcccctgaatgcggctaatcctaactgcggagcagatgcccaagctccagtgggtagtctgtcgtaacgggtaactctgcagcggaaccgactactttgggtgtccgtgtttccttttattcttacattggctgcttatggtgacaattgagaaattgttgccatatagctattggattggccatccggtgacgaatagagcaattgtgtatctttttgttggattcataccactagataatacaaacttcaaaaccttgtgttacatcattaggttaaacacagcaag

SEQ ID NO: 23075 - DNA, 584 bp, synthetic construct
  source 1..584: mol_type = other DNA
tcttgaccaagcacttctgttaccccggactgagtatcaataagctgctcacgcggctgaaggagaaaatgttcgttatccggccaattacttcgagaaacctagtaccaccatgaaggttgcgcagtgtttcgctccgcacaatcccagtgtagatcaggtcgatgagtcaccgcgttcctcacgggcgaccgtggcggtggctgcgctggcggcctgcccatggggcaacccatgggacgcttcaatactgacatggtgcgaagagtcaattgagctaattggtagtcctccggcccctgaatgcggctaatcctaactgcggagcagatgcccaagctccagtgggtagtctgtcgtaacgggtaactctgcagcggaaccgactactttgggtgtccgtgtttccttttattcttacattggctgcttatggtgacaattgagaaattgttgccatatagctattggattggccatccggtgacgaatagagcaattgtgtatctttttgttggattcataccactagataatacaaacttcaaaaccttgtgttacatcattaggttaaacacagcaag

SEQ ID NO: 23076 - DNA, 534 bp, synthetic construct
  source 1..534: mol_type = other DNA
acgcggctgaaggagaaaatgttcgttatccggccaattacttcgagaaacctagtaccaccatgaaggttgcgcagtgtttcgctccgcacaatcccagtgtagatcaggtcgatgagtcaccgcgttcctcacgggcgaccgtggcggtggctgcgctggcggcctgcccatggggcaacccatgggacgcttcaatactgacatggtgcgaagagtcaattgagctaattggtagtcctccggcccctgaatgcggctaatcctaactgcggagcagatgcccaagctccagtgggtagtctgtcgtaacgggtaactctgcagcggaaccgactactttgggtgtccgtgtttccttttattcttacattggctgcttatggtgacaattgagaaattgttgccatatagctattggattggccatccggtgacgaatagagcaattgtgtatctttttgttggattcataccactagataatacaaacttcaaaaccttgtgttacatcattaggttaaacacagcaag

SEQ ID NO: 23077 - DNA, 685 bp, synthetic construct
  source 1..685: mol_type = other DNA
accgttactccattcagcttcttcggaacctgttcggaggaattaaacgggcacccactcacccccatctccccctgtaacttgaagtgtgtgctcgtgaccttgactcctgcgggcttcaccgacccgtccagtgaacaaactgctaggtgatttcttcccctcccctagcctggatgttccacatccaggtcttcttcccccagcccgacatgtcatgggctgtttggaatccccgcgaaagctgctaacgtggcaattgtgggtcccccttccaacaagacaccgagtctttctcccttaaggctagccccgtgtggtgaattccaccgggcaactagtggtgtcaatgcatgcctccgacctcggccgcggagtgctgccccccaagttgcgaaactgaccaaggattgtgctgcctggcaagcatagtctgaggagatgttccgctgtggttgccaaacctggtaacaggtgccccagtgcgcgtagtctccttccggttcgtccggctgtcctttggtaaagacacaatgtaaggggcgtgtgccaacgccctggaaagagtgaacttctactgccctaggaatgccacgcaggtacccctggtttcttaccagggatctgagcgtgggctaattgtctaacgggtagtttcatttccctcccttcttttgttgacatc

SEQ ID NO: 23078 - DNA, 635 bp, synthetic construct
  source 1..635: mol_type = other DNA
gcacccactcacccccatctccccctgtaacttgaagtgtgtgctcgtgaccttgactcctgcgggcttcaccgacccgtccagtgaacaaactgctaggtgatttcttcccctcccctagcctggatgttccacatccaggtcttcttcccccagcccgacatgtcatgggctgtttggaatccccgcgaaagctgctaacgtggcaattgtgggtcccccttccaacaagacaccgagtctttctcccttaaggctagccccgtgtggtgaattccaccgggcaactagtggtgtcaatgcatgcctccgacctcggccgcggagtgctgccccccaagttgcgaaactgaccaaggattgtgctgcctggcaagcatagtctgaggagatgttccgctgtggttgccaaacctggtaacaggtgccccagtgcgcgtagtctccttccggttcgtccggctgtcctttggtaaagacacaatgtaaggggcgtgtgccaacgccctggaaagagtgaacttctactgccctaggaatgccacgcaggtacccctggtttcttaccagggatctgagcgtgggctaattgtctaacgggtagtttcatttccctcccttcttttgttgacatc

SEQ ID NO: 23079 - DNA, 585 bp, synthetic construct
  source 1..585: mol_type = other DNA
ccttgactcctgcgggcttcaccgacccgtccagtgaacaaactgctaggtgatttcttcccctcccctagcctggatgttccacatccaggtcttcttcccccagcccgacatgtcatgggctgtttggaatccccgcgaaagctgctaacgtggcaattgtgggtcccccttccaacaagacaccgagtctttctcccttaaggctagccccgtgtggtgaattccaccgggcaactagtggtgtcaatgcatgcctccgacctcggccgcggagtgctgccccccaagttgcgaaactgaccaaggattgtgctgcctggcaagcatagtctgaggagatgttccgctgtggttgccaaacctggtaacaggtgccccagtgcgcgtagtctccttccggttcgtccggctgtcctttggtaaagacacaatgtaaggggcgtgtgccaacgccctggaaagagtgaacttctactgccctaggaatgccacgcaggtacccctggtttcttaccagggatctgagcgtgggctaattgtctaacgggtagtttcatttccctcccttcttttgttgacatc

SEQ ID NO: 23080 - DNA, 535 bp, synthetic construct
  source 1..535: mol_type = other DNA
tgatttcttcccctcccctagcctggatgttccacatccaggtcttcttcccccagcccgacatgtcatgggctgtttggaatccccgcgaaagctgctaacgtggcaattgtgggtcccccttccaacaagacaccgagtctttctcccttaaggctagccccgtgtggtgaattccaccgggcaactagtggtgtcaatgcatgcctccgacctcggccgcggagtgctgccccccaagttgcgaaactgaccaaggattgtgctgcctggcaagcatagtctgaggagatgttccgctgtggttgccaaacctggtaacaggtgccccagtgcgcgtagtctccttccggttcgtccggctgtcctttggtaaagacacaatgtaaggggcgtgtgccaacgccctggaaagagtgaacttctactgccctaggaatgccacgcaggtacccctggtttcttaccagggatctgagcgtgggctaattgtctaacgggtagtttcatttccctcccttcttttgttgacatc

SEQ ID NO: 23081 - DNA, 685 bp, synthetic construct
  source 1..685: mol_type = other DNA
ggaccaccgttactccattcagcttcttcggaacctgttcggaggaattaaacgggcacccactttcctgtcctctccccttttctgtaactccaagtgtgtgctcgtaatcttgactcccgcggattgaccgctccgctggtgaacaaactgctaggtcatctcctccccacccttgggcgtccttccgggcgtccacaccctccccccagcctgacgtgtcacaggctgtacaaagaccccgcgaaagctgctaacgtggcaattgtgggtcccccctttgtaaaggaaccgagtctttctcccttaaggctagacccctgtgtgaattcacaggtggcaactagtggttccactgcatgctcccgacctcggccgcggagtgctgttccccaagtcgtaacactgaccttcacttatgtgcctggcaagcatatctgagaagatgttccgctgtggctgccaaacctggtaacaggtgccccagtgtgcgtagtcttcttccgtcttcggacggtaggtgttaggtaaagatgcggcgtaaggttcaagtgccaacgccctggaagggatgacccttctactgccctaggaatgccgcgcaggtaccccaggttcgcctgggatctgagcgcgggctaattgtctacgggtagtttcatttccctcttcttccactggcatc

SEQ ID NO: 23082 - DNA, 635 bp, synthetic construct
  source 1..635: mol_type = other DNA
aacgggcacccactttcctgtcctctccccttttctgtaactccaagtgtgtgctcgtaatcttgactcccgcggattgaccgctccgctggtgaacaaactgctaggtcatctcctccccacccttgggcgtccttccgggcgtccacaccctccccccagcctgacgtgtcacaggctgtacaaagaccccgcgaaagctgctaacgtggcaattgtgggtcccccctttgtaaaggaaccgagtctttctcccttaaggctagacccctgtgtgaattcacaggtggcaactagtggttccactgcatgctcccgacctcggccgcggagtgctgttccccaagtcgtaacactgaccttcacttatgtgcctggcaagcatatctgagaagatgttccgctgtggctgccaaacctggtaacaggtgccccagtgtgcgtagtcttcttccgtcttcggacggtaggtgttaggtaaagatgcggcgtaaggttcaagtgccaacgccctggaagggatgacccttctactgccctaggaatgccgcgcaggtaccccaggttcgcctgggatctgagcgcgggctaattgtctacgggtagtttcatttccctcttcttccactggcatc

SEQ ID NO: 23083 - DNA, 585 bp, synthetic construct
  source 1..585: mol_type = other DNA
gtgctcgtaatcttgactcccgcggattgaccgctccgctggtgaacaaactgctaggtcatctcctccccacccttgggcgtccttccgggcgtccacaccctccccccagcctgacgtgtcacaggctgtacaaagaccccgcgaaagctgctaacgtggcaattgtgggtcccccctttgtaaaggaaccgagtctttctcccttaaggctagacccctgtgtgaattcacaggtggcaactagtggttccactgcatgctcccgacctcggccgcggagtgctgttccccaagtcgtaacactgaccttcacttatgtgcctggcaagcatatctgagaagatgttccgctgtggctgccaaacctggtaacaggtgccccagtgtgcgtagtcttcttccgtcttcggacggtaggtgttaggtaaagatgcggcgtaaggttcaagtgccaacgccctggaagggatgacccttctactgccctaggaatgccgcgcaggtaccccaggttcgcctgggatctgagcgcgggctaattgtctacgggtagtttcatttccctcttcttccactggcatc

SEQ ID NO: 23084 - DNA, 535 bp, synthetic construct
  source 1..535: mol_type = other DNA
ctgctaggtcatctcctccccacccttgggcgtccttccgggcgtccacaccctccccccagcctgacgtgtcacaggctgtacaaagaccccgcgaaagctgctaacgtggcaattgtgggtcccccctttgtaaaggaaccgagtctttctcccttaaggctagacccctgtgtgaattcacaggtggcaactagtggttccactgcatgctcccgacctcggccgcggagtgctgttccccaagtcgtaacactgaccttcacttatgtgcctggcaagcatatctgagaagatgttccgctgtggctgccaaacctggtaacaggtgccccagtgtgcgtagtcttcttccgtcttcggacggtaggtgttaggtaaagatgcggcgtaaggttcaagtgccaacgccctggaagggatgacccttctactgccctaggaatgccgcgcaggtaccccaggttcgcctgggatctgagcgcgggctaattgtctacgggtagtttcatttccctcttcttccactggcatc

SEQ ID NO: 23085 - DNA, 685 bp, synthetic construct
  source 1..685: mol_type = other DNA
attacggtacccttgtgcgcctgttttattcaccccctccccctacgtaacttagaagcgatacctacatggtcaacaggtgccccagcataccagctgggtcatgaccaagcaattctgttaccccggactgagtatcaataagctgctcgcgcggctgaaggagaaaacgttcgttacccggccagttacttcgagaaacccagtaccaccatgaaggttgcgcagtgtttcgctccgcacaaccccagtgtagatcaggtcgatgagtcaccgcgttccccacgggtgaccgtggcggtggctgcgttggcggcctgcccatggggcaacccgtgggacgcttcaatactgacatggtgtgaagagtctattgagctaactggtagtcctccggcccctgaatgcggctaatcctaactgcggagcagatgcccacatgccagtgggtggtctgtcgtaacgggcaactctgcagcggaaccgactactttgggtgtccgtgtttccttttattcctaaactggctgcttatggtgacaattgagagattgttaccatatagctattggattggccatccggtgacgaacagagctatcatttatttatttgttggttttgtgccgttgaaccgcaaagttctacacaccatcaatttcatcctactgcttaactcgacaaa

SEQ ID NO: 23086 - DNA, 635 bp, synthetic construct
  source 1..635: mol_type = other DNA
cttagaagcgatacctacatggtcaacaggtgccccagcataccagctgggtcatgaccaagcaattctgttaccccggactgagtatcaataagctgctcgcgcggctgaaggagaaaacgttcgttacccggccagttacttcgagaaacccagtaccaccatgaaggttgcgcagtgtttcgctccgcacaaccccagtgtagatcaggtcgatgagtcaccgcgttccccacgggtgaccgtggcggtggctgcgttggcggcctgcccatggggcaacccgtgggacgcttcaatactgacatggtgtgaagagtctattgagctaactggtagtcctccggcccctgaatgcggctaatcctaactgcggagcagatgcccacatgccagtgggtggtctgtcgtaacgggcaactctgcagcggaaccgactactttgggtgtccgtgtttccttttattcctaaactggctgcttatggtgacaattgagagattgttaccatatagctattggattggccatccggtgacgaacagagctatcatttatttatttgttggttttgtgccgttgaaccgcaaagttctacacaccatcaatttcatcctactgcttaactcgacaaa

SEQ ID NO: 23087 - DNA, 585 bp, synthetic construct
  source 1..585: mol_type = other DNA
gtcatgaccaagcaattctgttaccccggactgagtatcaataagctgctcgcgcggctgaaggagaaaacgttcgttacccggccagttacttcgagaaacccagtaccaccatgaaggttgcgcagtgtttcgctccgcacaaccccagtgtagatcaggtcgatgagtcaccgcgttccccacgggtgaccgtggcggtggctgcgttggcggcctgcccatggggcaacccgtgggacgcttcaatactgacatggtgtgaagagtctattgagctaactggtagtcctccggcccctgaatgcggctaatcctaactgcggagcagatgcccacatgccagtgggtggtctgtcgtaacgggcaactctgcagcggaaccgactactttgggtgtccgtgtttccttttattcctaaactggctgcttatggtgacaattgagagattgttaccatatagctattggattggccatccggtgacgaacagagctatcatttatttatttgttggttttgtgccgttgaaccgcaaagttctacacaccatcaatttcatcctactgcttaactcgacaaa

SEQ ID NO: 23088 - DNA, 535 bp, synthetic construct
  source 1..535: mol_type = other DNA
cgcgcggctgaaggagaaaacgttcgttacccggccagttacttcgagaaacccagtaccaccatgaaggttgcgcagtgtttcgctccgcacaaccccagtgtagatcaggtcgatgagtcaccgcgttccccacgggtgaccgtggcggtggctgcgttggcggcctgcccatggggcaacccgtgggacgcttcaatactgacatggtgtgaagagtctattgagctaactggtagtcctccggcccctgaatgcggctaatcctaactgcggagcagatgcccacatgccagtgggtggtctgtcgtaacgggcaactctgcagcggaaccgactactttgggtgtccgtgtttccttttattcctaaactggctgcttatggtgacaattgagagattgttaccatatagctattggattggccatccggtgacgaacagagctatcatttatttatttgttggttttgtgccgttgaaccgcaaagttctacacaccatcaatttcatcctactgcttaactcgacaaa

SEQ ID NO: 23089 - DNA, 685 bp, synthetic construct
  source 1..685: mol_type = other DNA
gtactgcggtacctttgtgcgcctgttttatcaccccaccccatccggaacgtagaagctagacttaaatggtcaatagacggcccagtatgccaattgggtctcgaccaagcactcctgtttccccgggtttagtatcaataagctgctcacgtggctgaaggagaaaacacccgttatccggccaactacttcgagaaacttagtaccgctatgaacgttgcaaggcgtttcgctcagcacttcccccgtgtagatcaggccgatgagtcaccgcattcctcacgggcgaccgtggcggtggctgcgctggcggcctgcctatgggcttgcccataggacgccttaatactgacatggtgcgaagagtctattgagctagttggtagtcctccggcccctgaatgcggctaatcctaactgcggagcacatactcacaaaccagtgagcagtgtgtcgtaacgggcaactctgcagcggaaccgactactttgggtgtccgtgtttccttttattcctacactggctgcttatggtgacaattaaagaattgttaccatatagctattggattggccatccggtgtctaacagagctattatatacttgtttgttggattcataccacttgattccaatagctataacaccctactttacatcgttcatttgaacacgagaaa

SEQ ID NO: 23090 - DNA, 635 bp, synthetic construct
  source 1..635: mol_type = other DNA
cgtagaagctagacttaaatggtcaatagacggcccagtatgccaattgggtctcgaccaagcactcctgtttccccgggtttagtatcaataagctgctcacgtggctgaaggagaaaacacccgttatccggccaactacttcgagaaacttagtaccgctatgaacgttgcaaggcgtttcgctcagcacttcccccgtgtagatcaggccgatgagtcaccgcattcctcacgggcgaccgtggcggtggctgcgctggcggcctgcctatgggcttgcccataggacgccttaatactgacatggtgcgaagagtctattgagctagttggtagtcctccggcccctgaatgcggctaatcctaactgcggagcacatactcacaaaccagtgagcagtgtgtcgtaacgggcaactctgcagcggaaccgactactttgggtgtccgtgtttccttttattcctacactggctgcttatggtgacaattaaagaattgttaccatatagctattggattggccatccggtgtctaacagagctattatatacttgtttgttggattcataccacttgattccaatagctataacaccctactttacatcgttcatttgaacacgagaaa

SEQ ID NO: 23091 - DNA, 585 bp, synthetic construct
  source 1..585: mol_type = other DNA
gtctcgaccaagcactcctgtttccccgggtttagtatcaataagctgctcacgtggctgaaggagaaaacacccgttatccggccaactacttcgagaaacttagtaccgctatgaacgttgcaaggcgtttcgctcagcacttcccccgtgtagatcaggccgatgagtcaccgcattcctcacgggcgaccgtggcggtggctgcgctggcggcctgcctatgggcttgcccataggacgccttaatactgacatggtgcgaagagtctattgagctagttggtagtcctccggcccctgaatgcggctaatcctaactgcggagcacatactcacaaaccagtgagcagtgtgtcgtaacgggcaactctgcagcggaaccgactactttgggtgtccgtgtttccttttattcctacactggctgcttatggtgacaattaaagaattgttaccatatagctattggattggccatccggtgtctaacagagctattatatacttgtttgttggattcataccacttgattccaatagctataacaccctactttacatcgttcatttgaacacgagaaa

SEQ ID NO: 23092 - DNA, 535 bp, synthetic construct
  source 1..535: mol_type = other DNA
cacgtggctgaaggagaaaacacccgttatccggccaactacttcgagaaacttagtaccgctatgaacgttgcaaggcgtttcgctcagcacttcccccgtgtagatcaggccgatgagtcaccgcattcctcacgggcgaccgtggcggtggctgcgctggcggcctgcctatgggcttgcccataggacgccttaatactgacatggtgcgaagagtctattgagctagttggtagtcctccggcccctgaatgcggctaatcctaactgcggagcacatactcacaaaccagtgagcagtgtgtcgtaacgggcaactctgcagcggaaccgactactttgggtgtccgtgtttccttttattcctacactggctgcttatggtgacaattaaagaattgttaccatatagctattggattggccatccggtgtctaacagagctattatatacttgtttgttggattcataccacttgattccaatagctataacaccctactttacatcgttcatttgaacacgagaaa

SEQ ID NO: 23093 - DNA, 686 bp, synthetic construct
  source 1..686: mol_type = other DNA
ggaccaccgttactccattcagcttcttcggaacctgttcggaggaattaaacgggcacccactttcctgtcctctccccctttctgcaactcaagtgtgtgctcgtaatcctgactcccacgggttgaccgccccgttggtgaacaaacagctaggtcattccctccctacccctgggcgccatttcagtggcgttcatatcctccccccagcctgacgtgtcacaggctgtgcaaagtccccgcgaaagctgctcacgtggcaattgtgggtcccccctttgtgaaggaaccgagtctttctcccttaaggctagacccctgtgtgaactcacaggtggcaactagtggttccactgcatgctcccgacctcggccgcggagtgctgttccccaagtcgtgacactgacctccacttatgtgcctggcaagcatatctgagaagatgttccgctgtggctgccaaacctggtaacaggtgccccagtgcgtgtagtcttcttccgtctccggacggtaagtgtgtggtaaagatgcggcgtaaggttcaagtgccaacgccctggaagggatgacccttctactgccctaggaatgccgcgcaggtaccccaggttcgcctgggatctgagcgcgggctaattgtctacgggtagtttcatttccctctcttttcactggcatc

SEQ ID NO: 23094 - DNA, 636 bp, synthetic construct
  source 1..636: mol_type = other DNA
aacgggcacccactttcctgtcctctccccctttctgcaactcaagtgtgtgctcgtaatcctgactcccacgggttgaccgccccgttggtgaacaaacagctaggtcattccctccctacccctgggcgccatttcagtggcgttcatatcctccccccagcctgacgtgtcacaggctgtgcaaagtccccgcgaaagctgctcacgtggcaattgtgggtcccccctttgtgaaggaaccgagtctttctcccttaaggctagacccctgtgtgaactcacaggtggcaactagtggttccactgcatgctcccgacctcggccgcggagtgctgttccccaagtcgtgacactgacctccacttatgtgcctggcaagcatatctgagaagatgttccgctgtggctgccaaacctggtaacaggtgccccagtgcgtgtagtcttcttccgtctccggacggtaagtgtgtggtaaagatgcggcgtaaggttcaagtgccaacgccctggaagggatgacccttctactgccctaggaatgccgcgcaggtaccccaggttcgcctgggatctgagcgcgggctaattgtctacgggtagtttcatttccctctcttttcactggcatc

SEQ ID NO: 23095 - DNA, 586 bp, synthetic construct
  source 1..586: mol_type = other DNA
tgctcgtaatcctgactcccacgggttgaccgccccgttggtgaacaaacagctaggtcattccctccctacccctgggcgccatttcagtggcgttcatatcctccccccagcctgacgtgtcacaggctgtgcaaagtccccgcgaaagctgctcacgtggcaattgtgggtcccccctttgtgaaggaaccgagtctttctcccttaaggctagacccctgtgtgaactcacaggtggcaactagtggttccactgcatgctcccgacctcggccgcggagtgctgttccccaagtcgtgacactgacctccacttatgtgcctggcaagcatatctgagaagatgttccgctgtggctgccaaacctggtaacaggtgccccagtgcgtgtagtcttcttccgtctccggacggtaagtgtgtggtaaagatgcggcgtaaggttcaagtgccaacgccctggaagggatgacccttctactgccctaggaatgccgcgcaggtaccccaggttcgcctgggatctgagcgcgggctaattgtctacgggtagtttcatttccctctcttttcactggcatc

SEQ ID NO: 23096 - DNA, 536 bp, synthetic construct
  source 1..536: mol_type = other DNA
agctaggtcattccctccctacccctgggcgccatttcagtggcgttcatatcctccccccagcctgacgtgtcacaggctgtgcaaagtccccgcgaaagctgctcacgtggcaattgtgggtcccccctttgtgaaggaaccgagtctttctcccttaaggctagacccctgtgtgaactcacaggtggcaactagtggttccactgcatgctcccgacctcggccgcggagtgctgttccccaagtcgtgacactgacctccacttatgtgcctggcaagcatatctgagaagatgttccgctgtggctgccaaacctggtaacaggtgccccagtgcgtgtagtcttcttccgtctccggacggtaagtgtgtggtaaagatgcggcgtaaggttcaagtgccaacgccctggaagggatgacccttctactgccctaggaatgccgcgcaggtaccccaggttcgcctgggatctgagcgcgggctaattgtctacgggtagtttcatttccctctcttttcactggcatc

SEQ ID NO: 23097 - DNA, 686 bp, synthetic construct
  source 1..686: mol_type = other DNA
ccacggtacccttgtacgcctgttttatatcccctccccacgcaactttagaagaaattcaccaagttcaatagggggggtacgaaccagtaccaccacgaacaagcacttctgtttccccggtgattttacataggctgtacccacggctgaaagtgaatgatccgttacccgcttgagtacttcgagaagcctagtaccaccttggaatctccgatgcgttgcgttcagcactctaacccgagtgtagcttaggctgatgagtctgggcgatccccaccggcgacggtggcccaggctgcgttggcggcctacccgtggctaacgctacgggacgctagttttgaacaaggtgtgaagagcctattgagctacccaagaatcctccggcccctgaatgcggctaatcccaaccatggagcaagtgccctcaagccagggggtggcttgtcgtaacgcgtaagtctgtggcggaaccgactactttgggtgtccgtgtttccttttatttcatatttggctgcttatggtgacaatcacagattgttatcataaagcgaattggattggccatccagtgaaatataagctcattgtttatctccttgttggatttgttctgttaggaaattcctcaataaagttgactcgggtaatcttagtgattagaagtcatcatttcaaca

SEQ ID NO: 23098 - DNA, 636 bp, synthetic construct
  source 1..636: mol_type = other DNA
gaagaaattcaccaagttcaatagggggggtacgaaccagtaccaccacgaacaagcacttctgtttccccggtgattttacataggctgtacccacggctgaaagtgaatgatccgttacccgcttgagtacttcgagaagcctagtaccaccttggaatctccgatgcgttgcgttcagcactctaacccgagtgtagcttaggctgatgagtctgggcgatccccaccggcgacggtggcccaggctgcgttggcggcctacccgtggctaacgctacgggacgctagttttgaacaaggtgtgaagagcctattgagctacccaagaatcctccggcccctgaatgcggctaatcccaaccatggagcaagtgccctcaagccagggggtggcttgtcgtaacgcgtaagtctgtggcggaaccgactactttgggtgtccgtgtttccttttatttcatatttggctgcttatggtgacaatcacagattgttatcataaagcgaattggattggccatccagtgaaatataagctcattgtttatctccttgttggatttgttctgttaggaaattcctcaataaagttgactcgggtaatcttagtgattagaagtcatcatttcaaca

SEQ ID NO: 23099 - DNA, 586 bp, synthetic construct
  source 1..586: mol_type = other DNA
aacaagcacttctgtttccccggtgattttacataggctgtacccacggctgaaagtgaatgatccgttacccgcttgagtacttcgagaagcctagtaccaccttggaatctccgatgcgttgcgttcagcactctaacccgagtgtagcttaggctgatgagtctgggcgatccccaccggcgacggtggcccaggctgcgttggcggcctacccgtggctaacgctacgggacgctagttttgaacaaggtgtgaagagcctattgagctacccaagaatcctccggcccctgaatgcggctaatcccaaccatggagcaagtgccctcaagccagggggtggcttgtcgtaacgcgtaagtctgtggcggaaccgactactttgggtgtccgtgtttccttttatttcatatttggctgcttatggtgacaatcacagattgttatcataaagcgaattggattggccatccagtgaaatataagctcattgtttatctccttgttggatttgttctgttaggaaattcctcaataaagttgactcgggtaatcttagtgattagaagtcatcatttcaaca

SEQ ID NO: 23100 - DNA, 536 bp, synthetic construct
  source 1..536: mol_type = other DNA
tgaaagtgaatgatccgttacccgcttgagtacttcgagaagcctagtaccaccttggaatctccgatgcgttgcgttcagcactctaacccgagtgtagcttaggctgatgagtctgggcgatccccaccggcgacggtggcccaggctgcgttggcggcctacccgtggctaacgctacgggacgctagttttgaacaaggtgtgaagagcctattgagctacccaagaatcctccggcccctgaatgcggctaatcccaaccatggagcaagtgccctcaagccagggggtggcttgtcgtaacgcgtaagtctgtggcggaaccgactactttgggtgtccgtgtttccttttatttcatatttggctgcttatggtgacaatcacagattgttatcataaagcgaattggattggccatccagtgaaatataagctcattgtttatctccttgttggatttgttctgttaggaaattcctcaataaagttgactcgggtaatcttagtgattagaagtcatcatttcaaca

SEQ ID NO: 23101 - DNA, 686 bp, synthetic construct
  source 1..686: mol_type = other DNA
gtatcccggtacctttgtgcgcctgttttacacaccctcccccgatggcaacttagaagatttccacacacggtcaataggcggctcagtataccaactgggtcatgaccaagcacttctgttcccccggactgagtatcaataagctgctcacgtggctgaaggagaaaacgttcgttatccggccaattacttcgagaagcttagtaccaccatagaggttgcgcagtgtttcgctccgcacaaccccagtgtagatcaggtcgatgagtcaccgcactcctcacgggcgaccgtggcggtggctgcgctggcggcctgcccatggggcaacccatgggacgcttcaatactgacatggtgcgaagagcctattgagctaattggtattcctccggcccctgaatgcggctaatcctaactgcggagcagatacccacgagccagtgggcagtctgtcgtaatgggtaactctgcagcggaaccgactactttgggtgtccgtgtttccttttattcctatattggctgctaatggtgacaattgagagattgttgccatatagctattggattggccatccggtgacaaacagagcgattatctatctatttgttggcttcataccattaaaccttagagtcctaaagaccctcaacttaattatacaatttaactctgcgaa

SEQ ID NO: 23102 - DNA, 636 bp, synthetic construct
  source 1..636: mol_type = other DNA
acttagaagatttccacacacggtcaataggcggctcagtataccaactgggtcatgaccaagcacttctgttcccccggactgagtatcaataagctgctcacgtggctgaaggagaaaacgttcgttatccggccaattacttcgagaagcttagtaccaccatagaggttgcgcagtgtttcgctccgcacaaccccagtgtagatcaggtcgatgagtcaccgcactcctcacgggcgaccgtggcggtggctgcgctggcggcctgcccatggggcaacccatgggacgcttcaatactgacatggtgcgaagagcctattgagctaattggtattcctccggcccctgaatgcggctaatcctaactgcggagcagatacccacgagccagtgggcagtctgtcgtaatgggtaactctgcagcggaaccgactactttgggtgtccgtgtttccttttattcctatattggctgctaatggtgacaattgagagattgttgccatatagctattggattggccatccggtgacaaacagagcgattatctatctatttgttggcttcataccattaaaccttagagtcctaaagaccctcaacttaattatacaatttaactctgcgaa

SEQ ID NO: 23103 - DNA, 586 bp, synthetic construct
  source 1..586: mol_type = other DNA
ggtcatgaccaagcacttctgttcccccggactgagtatcaataagctgctcacgtggctgaaggagaaaacgttcgttatccggccaattacttcgagaagcttagtaccaccatagaggttgcgcagtgtttcgctccgcacaaccccagtgtagatcaggtcgatgagtcaccgcactcctcacgggcgaccgtggcggtggctgcgctggcggcctgcccatggggcaacccatgggacgcttcaatactgacatggtgcgaagagcctattgagctaattggtattcctccggcccctgaatgcggctaatcctaactgcggagcagatacccacgagccagtgggcagtctgtcgtaatgggtaactctgcagcggaaccgactactttgggtgtccgtgtttccttttattcctatattggctgctaatggtgacaattgagagattgttgccatatagctattggattggccatccggtgacaaacagagcgattatctatctatttgttggcttcataccattaaaccttagagtcctaaagaccctcaacttaattatacaatttaactctgcgaa

SEQ ID NO: 23104 - DNA, 536 bp, synthetic construct
  source 1..536: mol_type = other DNA
tcacgtggctgaaggagaaaacgttcgttatccggccaattacttcgagaagcttagtaccaccatagaggttgcgcagtgtttcgctccgcacaaccccagtgtagatcaggtcgatgagtcaccgcactcctcacgggcgaccgtggcggtggctgcgctggcggcctgcccatggggcaacccatgggacgcttcaatactgacatggtgcgaagagcctattgagctaattggtattcctccggcccctgaatgcggctaatcctaactgcggagcagatacccacgagccagtgggcagtctgtcgtaatgggtaactctgcagcggaaccgactactttgggtgtccgtgtttccttttattcctatattggctgctaatggtgacaattgagagattgttgccatatagctattggattggccatccggtgacaaacagagcgattatctatctatttgttggcttcataccattaaaccttagagtcctaaagaccctcaacttaattatacaatttaactctgcgaa

SEQ ID NO: 23105 - DNA, 687 bp, synthetic construct
  source 1..687: mol_type = other DNA
cgtcactccattcagcttcttcggaacctgttcggaggaattaaacgggcaccccacttcccccccccaccctcgcaacttcaagtgtgtgtgcccataaccttgacccctgccggtatgccgcccggttcagtggacaaactgctaggcaaattcccccctccccctgtggctggtccttcaaccagccactctcttccccccagccggacgtgctacaggctgtgcaaagcccccgcgaaagctgctcacgtggcaattgtgggtcccccctttgtcaaggcttcgagtctttctcccttaaggctagtcccgtactgtgaaatcagtgtgggcaactagtgaagccactgcacgctcccgaccacggacgcggagtgctgtcccccaagtcatgacactaacaccaagctgtgctgcctggcaagcatagcctgggaaggtgttccgctgtggctgccaaacctggtaacaggtgccccagtgtgtgtaaccttcctccagtcttcggactggcagctttgtgtgaagacgtgacgtaaggttcaagtgccaactccctggaagggatgacccctctactgccctaggaatgctacgcaggtacccctggttcgccagggatctgagcgtaggctaattgtctacgggtagtttcatttcccacctttttatttctttagcatc

SEQ ID NO: 23106 - DNA, 637 bp, synthetic construct
  source 1..637: mol_type = other DNA
accccacttcccccccccaccctcgcaacttcaagtgtgtgtgcccataaccttgacccctgccggtatgccgcccggttcagtggacaaactgctaggcaaattcccccctccccctgtggctggtccttcaaccagccactctcttccccccagccggacgtgctacaggctgtgcaaagcccccgcgaaagctgctcacgtggcaattgtgggtcccccctttgtcaaggcttcgagtctttctcccttaaggctagtcccgtactgtgaaatcagtgtgggcaactagtgaagccactgcacgctcccgaccacggacgcggagtgctgtcccccaagtcatgacactaacaccaagctgtgctgcctggcaagcatagcctgggaaggtgttccgctgtggctgccaaacctggtaacaggtgccccagtgtgtgtaaccttcctccagtcttcggactggcagctttgtgtgaagacgtgacgtaaggttcaagtgccaactccctggaagggatgacccctctactgccctaggaatgctacgcaggtacccctggttcgccagggatctgagcgtaggctaattgtctacgggtagtttcatttcccacctttttatttctttagcatc

SEQ ID NO: 23107 - DNA, 587 bp, synthetic construct
  source 1..587: mol_type = other DNA
ccttgacccctgccggtatgccgcccggttcagtggacaaactgctaggcaaattcccccctccccctgtggctggtccttcaaccagccactctcttccccccagccggacgtgctacaggctgtgcaaagcccccgcgaaagctgctcacgtggcaattgtgggtcccccctttgtcaaggcttcgagtctttctcccttaaggctagtcccgtactgtgaaatcagtgtgggcaactagtgaagccactgcacgctcccgaccacggacgcggagtgctgtcccccaagtcatgacactaacaccaagctgtgctgcctggcaagcatagcctgggaaggtgttccgctgtggctgccaaacctggtaacaggtgccccagtgtgtgtaaccttcctccagtcttcggactggcagctttgtgtgaagacgtgacgtaaggttcaagtgccaactccctggaagggatgacccctctactgccctaggaatgctacgcaggtacccctggttcgccagggatctgagcgtaggctaattgtctacgggtagtttcatttcccacctttttatttctttagcatc

SEQ ID NO: 23108 - DNA, 537 bp, synthetic construct
  source 1..537: mol_type = other DNA
aaattcccccctccccctgtggctggtccttcaaccagccactctcttccccccagccggacgtgctacaggctgtgcaaagcccccgcgaaagctgctcacgtggcaattgtgggtcccccctttgtcaaggcttcgagtctttctcccttaaggctagtcccgtactgtgaaatcagtgtgggcaactagtgaagccactgcacgctcccgaccacggacgcggagtgctgtcccccaagtcatgacactaacaccaagctgtgctgcctggcaagcatagcctgggaaggtgttccgctgtggctgccaaacctggtaacaggtgccccagtgtgtgtaaccttcctccagtcttcggactggcagctttgtgtgaagacgtgacgtaaggttcaagtgccaactccctggaagggatgacccctctactgccctaggaatgctacgcaggtacccctggttcgccagggatctgagcgtaggctaattgtctacgggtagtttcatttcccacctttttatttctttagcatc

SEQ ID NO: 23109 - DNA, 687 bp, synthetic construct
  source 1..687: mol_type = other DNA
tctgcggaatctttgtgcgcctgttttatgaccctcccccgaaacttgtaacttagaagttatgtacatcaccgatcaatagcaggcgtggcgcaccagccatgtcttgatcaagcacttctgtacccccggactgagtatcaatagactgctcacgcggttgaaggagaaaatgttcgttacccggctaactacttcgagaaacctagtaacaccattgaaactgcggagtgtttcgctcagcattccccccatgtagatcaggtcgatgagtcactgcttaccccacgggcgaccgtggcagtggctgcgttggcggcctgcctatggggcaacccataggacgctctaaagtggacatggtgcgaagagtctattgagctagttagtagtcctccggcccctgaatgcggctaatcctaactgcggagcgcatgtcctcaaaccagagggtggtgcgtcgtaatgggtaactctgcagcggaaccgactactttgggtgtccgtgtttcttttgttcttaaaatggctgcttatggtgacaatcgaggaattgttaccatatagctattggattggccatccggtgtgcaacagagctattatctacttgtttgtcggatacatccccttaacacctaaatcctttaatacattgcattatattttaacattgaacgcgagaaa

SEQ ID NO: 23110 - DNA, 637 bp, synthetic construct
  source 1..637: mol_type = other DNA
acttagaagttatgtacatcaccgatcaatagcaggcgtggcgcaccagccatgtcttgatcaagcacttctgtacccccggactgagtatcaatagactgctcacgcggttgaaggagaaaatgttcgttacccggctaactacttcgagaaacctagtaacaccattgaaactgcggagtgtttcgctcagcattccccccatgtagatcaggtcgatgagtcactgcttaccccacgggcgaccgtggcagtggctgcgttggcggcctgcctatggggcaacccataggacgctctaaagtggacatggtgcgaagagtctattgagctagttagtagtcctccggcccctgaatgcggctaatcctaactgcggagcgcatgtcctcaaaccagagggtggtgcgtcgtaatgggtaactctgcagcggaaccgactactttgggtgtccgtgtttcttttgttcttaaaatggctgcttatggtgacaatcgaggaattgttaccatatagctattggattggccatccggtgtgcaacagagctattatctacttgtttgtcggatacatccccttaacacctaaatcctttaatacattgcattatattttaacattgaacgcgagaaa

SEQ ID NO: 23111 - DNA, 587 bp, synthetic construct
  source 1..587: mol_type = other DNA
catgtcttgatcaagcacttctgtacccccggactgagtatcaatagactgctcacgcggttgaaggagaaaatgttcgttacccggctaactacttcgagaaacctagtaacaccattgaaactgcggagtgtttcgctcagcattccccccatgtagatcaggtcgatgagtcactgcttaccccacgggcgaccgtggcagtggctgcgttggcggcctgcctatggggcaacccataggacgctctaaagtggacatggtgcgaagagtctattgagctagttagtagtcctccggcccctgaatgcggctaatcctaactgcggagcgcatgtcctcaaaccagagggtggtgcgtcgtaatgggtaactctgcagcggaaccgactactttgggtgtccgtgtttcttttgttcttaaaatggctgcttatggtgacaatcgaggaattgttaccatatagctattggattggccatccggtgtgcaacagagctattatctacttgtttgtcggatacatccccttaacacctaaatcctttaatacattgcattatattttaacattgaacgcgagaaa

SEQ ID NO: 23112 - DNA, 537 bp, synthetic construct
  source 1..537: mol_type = other DNA
gctcacgcggttgaaggagaaaatgttcgttacccggctaactacttcgagaaacctagtaacaccattgaaactgcggagtgtttcgctcagcattccccccatgtagatcaggtcgatgagtcactgcttaccccacgggcgaccgtggcagtggctgcgttggcggcctgcctatggggcaacccataggacgctctaaagtggacatggtgcgaagagtctattgagctagttagtagtcctccggcccctgaatgcggctaatcctaactgcggagcgcatgtcctcaaaccagagggtggtgcgtcgtaatgggtaactctgcagcggaaccgactactttgggtgtccgtgtttcttttgttcttaaaatggctgcttatggtgacaatcgaggaattgttaccatatagctattggattggccatccggtgtgcaacagagctattatctacttgtttgtcggatacatccccttaacacctaaatcctttaatacattgcattatattttaacattgaacgcgagaaa

SEQ ID NO: 23113 - DNA, 687 bp, synthetic construct
  source 1..687: mol_type = other DNA
attacggtacccttgtacgcctgttttatactccctttccccgtaacttagaagcaacaatccaagttcaatagaagggggtacaaaccagtaccaccacgaacaagcacttctgtttccccggtgaagttgcatagactgtacccacggttgaaagcgactgatccgttatccgctcttgtacttcgagaagcctagtatcactttggaatcttcgatgcgttgcgctcagcacccaaccccggggtgtagcttaggtcgatgagtctggacgttcctcaccggcgacggtggtccaggctgcgttggcggcctacctgtggcccaaagccacaggacgctagttgtgaacaaggtgtgaagagcctattgagctacatgagattcctccggcccctgaatgcggctaatcccaaccacggagcaaatgcccacaacccagtgggtggtttgtcgtaacgagcaattctgtggcggaaccgactactttgggtgtccgtgtttccctttttattattatgtggctgcttatggtgacaatcattggttgttatcataaagcgaattggattggccatccggtaagagtaaaacatatcatttacctttttgttggatttactccattgagtgttttcaccccagacgtaattcgtgtggttctgctgattagaagtttctatcaca

SEQ ID NO: 23114 - DNA, 637 bp, synthetic construct
  source 1..637: mol_type = other DNA
gaagcaacaatccaagttcaatagaagggggtacaaaccagtaccaccacgaacaagcacttctgtttccccggtgaagttgcatagactgtacccacggttgaaagcgactgatccgttatccgctcttgtacttcgagaagcctagtatcactttggaatcttcgatgcgttgcgctcagcacccaaccccggggtgtagcttaggtcgatgagtctggacgttcctcaccggcgacggtggtccaggctgcgttggcggcctacctgtggcccaaagccacaggacgctagttgtgaacaaggtgtgaagagcctattgagctacatgagattcctccggcccctgaatgcggctaatcccaaccacggagcaaatgcccacaacccagtgggtggtttgtcgtaacgagcaattctgtggcggaaccgactactttgggtgtccgtgtttccctttttattattatgtggctgcttatggtgacaatcattggttgttatcataaagcgaattggattggccatccggtaagagtaaaacatatcatttacctttttgttggatttactccattgagtgttttcaccccagacgtaattcgtgtggttctgctgattagaagtttctatcaca

SEQ ID NO: 23115 - DNA, 587 bp, synthetic construct
  source 1..587: mol_type = other DNA
gaacaagcacttctgtttccccggtgaagttgcatagactgtacccacggttgaaagcgactgatccgttatccgctcttgtacttcgagaagcctagtatcactttggaatcttcgatgcgttgcgctcagcacccaaccccggggtgtagcttaggtcgatgagtctggacgttcctcaccggcgacggtggtccaggctgcgttggcggcctacctgtggcccaaagccacaggacgctagttgtgaacaaggtgtgaagagcctattgagctacatgagattcctccggcccctgaatgcggctaatcccaaccacggagcaaatgcccacaacccagtgggtggtttgtcgtaacgagcaattctgtggcggaaccgactactttgggtgtccgtgtttccctttttattattatgtggctgcttatggtgacaatcattggttgttatcataaagcgaattggattggccatccggtaagagtaaaacatatcatttacctttttgttggatttactccattgagtgttttcaccccagacgtaattcgtgtggttctgctgattagaagtttctatcaca

SEQ ID NO: 23116 - DNA, 537 bp, synthetic construct
  source 1..537: mol_type = other DNA
ttgaaagcgactgatccgttatccgctcttgtacttcgagaagcctagtatcactttggaatcttcgatgcgttgcgctcagcacccaaccccggggtgtagcttaggtcgatgagtctggacgttcctcaccggcgacggtggtccaggctgcgttggcggcctacctgtggcccaaagccacaggacgctagttgtgaacaaggtgtgaagagcctattgagctacatgagattcctccggcccctgaatgcggctaatcccaaccacggagcaaatgcccacaacccagtgggtggtttgtcgtaacgagcaattctgtggcggaaccgactactttgggtgtccgtgtttccctttttattattatgtggctgcttatggtgacaatcattggttgttatcataaagcgaattggattggccatccggtaagagtaaaacatatcatttacctttttgttggatttactccattgagtgttttcaccccagacgtaattcgtgtggttctgctgattagaagtttctatcaca

SEQ ID NO: 23117 - DNA, 687 bp, synthetic construct
  source 1..687: mol_type = other DNA
actctggtattacggtacctttgtacgcctattttacccccttccccttgtaacttagaagcaaagcaaaccagttcaatagtaagcaacacaacccagtgttgtgacgaacaagtacttctgtttccccgggagggtctgacggtaagctgtacccacggctgaagtatgacctaccgttaaccggctacctacttcgagaagtctagtaataccattgaagttttgttggcgttacgctcaacacactaccccgtgtgtagttttggctgatgagtcacggcattccccacgggcgaccgtggccgtggctgcgttgcggccaaccaaggggcgcaagctccttggacgtcacttaacagacatggtgtgaagaacctattgagctaggtagtagtcctccggcccctgaatgcggctaatcctaactccggagcacatcagtgcaacccagcatttggtgtgttgtaatacgcaagtctggagcggaaccgactactttgggtgtccgtgtttcctgttttaccttatttggctgcttatggtgacaatttgatattgttaccatatagctgttggattggccatccggatttttgaaagagacccaaaactttcttctctacttcagattcaagtgcgaagttttccttttcatatattacttactaatttgaagtaccaaag

SEQ ID NO: 23118 - DNA, 637 bp, synthetic construct
  source 1..637: mol_type = other DNA
taacttagaagcaaagcaaaccagttcaatagtaagcaacacaacccagtgttgtgacgaacaagtacttctgtttccccgggagggtctgacggtaagctgtacccacggctgaagtatgacctaccgttaaccggctacctacttcgagaagtctagtaataccattgaagttttgttggcgttacgctcaacacactaccccgtgtgtagttttggctgatgagtcacggcattccccacgggcgaccgtggccgtggctgcgttgcggccaaccaaggggcgcaagctccttggacgtcacttaacagacatggtgtgaagaacctattgagctaggtagtagtcctccggcccctgaatgcggctaatcctaactccggagcacatcagtgcaacccagcatttggtgtgttgtaatacgcaagtctggagcggaaccgactactttgggtgtccgtgtttcctgttttaccttatttggctgcttatggtgacaatttgatattgttaccatatagctgttggattggccatccggatttttgaaagagacccaaaactttcttctctacttcagattcaagtgcgaagttttccttttcatatattacttactaatttgaagtaccaaag

SEQ ID NO: 23119 - DNA, 587 bp, synthetic construct
  source 1..587: mol_type = other DNA
gttgtgacgaacaagtacttctgtttccccgggagggtctgacggtaagctgtacccacggctgaagtatgacctaccgttaaccggctacctacttcgagaagtctagtaataccattgaagttttgttggcgttacgctcaacacactaccccgtgtgtagttttggctgatgagtcacggcattccccacgggcgaccgtggccgtggctgcgttgcggccaaccaaggggcgcaagctccttggacgtcacttaacagacatggtgtgaagaacctattgagctaggtagtagtcctccggcccctgaatgcggctaatcctaactccggagcacatcagtgcaacccagcatttggtgtgttgtaatacgcaagtctggagcggaaccgactactttgggtgtccgtgtttcctgttttaccttatttggctgcttatggtgacaatttgatattgttaccatatagctgttggattggccatccggatttttgaaagagacccaaaactttcttctctacttcagattcaagtgcgaagttttccttttcatatattacttactaatttgaagtaccaaag

SEQ ID NO: 23120 - DNA, 537 bp, synthetic construct
  source 1..537: mol_type = other DNA
tgtacccacggctgaagtatgacctaccgttaaccggctacctacttcgagaagtctagtaataccattgaagttttgttggcgttacgctcaacacactaccccgtgtgtagttttggctgatgagtcacggcattccccacgggcgaccgtggccgtggctgcgttgcggccaaccaaggggcgcaagctccttggacgtcacttaacagacatggtgtgaagaacctattgagctaggtagtagtcctccggcccctgaatgcggctaatcctaactccggagcacatcagtgcaacccagcatttggtgtgttgtaatacgcaagtctggagcggaaccgactactttgggtgtccgtgtttcctgttttaccttatttggctgcttatggtgacaatttgatattgttaccatatagctgttggattggccatccggatttttgaaagagacccaaaactttcttctctacttcagattcaagtgcgaagttttccttttcatatattacttactaatttgaagtaccaaag

SEQ ID NO: 23121 - DNA, 687 bp, synthetic construct
  source 1..687: mol_type = other DNA
actctggtattacggtacctttgtacgcctattttatacccccttccccaagtaatttagaagcaagcacaaaccagttcagtagtaagcagtacaatccagtactgtaatgaacaagtacttctgttaccccggaagggtctatcggtaagctgtacccacggctgaagaatgacctaccgttaaccggctacctacttcgagaagcctagtaatgccgttgaagttttattgacgttacgctcagcacactaccccgtgtgtagttttggctgatgagtcacggcactccccacgggcgaccgtggccgtggctgcgttggcggccaaccaaggagtgcaagctccttggacgtcatattacagacatggtgtgaagagcctattgagctaggtggtagtcctccggcccctgaatgcggctaatcctaactccggagcatatcggtgcgaaccagcacttggtgtgttgtaatacgtaagtctggagcggaaccgactactttgggtgtccgtgtttcctgttttaacttttatggctgcttatggtgacaatttaacattgttaccatatagctgttgggttggccatccggattttgttataaaaccatttcctcgtgccttgacctttaacacatttgtgaacttctttaaatcccttttattagtccttaaatactaaga

SEQ ID NO: 23122 - DNA, 637 bp, synthetic construct
  source 1..637: mol_type = other DNA
agtaatttagaagcaagcacaaaccagttcagtagtaagcagtacaatccagtactgtaatgaacaagtacttctgttaccccggaagggtctatcggtaagctgtacccacggctgaagaatgacctaccgttaaccggctacctacttcgagaagcctagtaatgccgttgaagttttattgacgttacgctcagcacactaccccgtgtgtagttttggctgatgagtcacggcactccccacgggcgaccgtggccgtggctgcgttggcggccaaccaaggagtgcaagctccttggacgtcatattacagacatggtgtgaagagcctattgagctaggtggtagtcctccggcccctgaatgcggctaatcctaactccggagcatatcggtgcgaaccagcacttggtgtgttgtaatacgtaagtctggagcggaaccgactactttgggtgtccgtgtttcctgttttaacttttatggctgcttatggtgacaatttaacattgttaccatatagctgttgggttggccatccggattttgttataaaaccatttcctcgtgccttgacctttaacacatttgtgaacttctttaaatcccttttattagtccttaaatactaaga

SEQ ID NO: 23123 - DNA, 587 bp, synthetic construct
  source 1..587: mol_type = other DNA
agtactgtaatgaacaagtacttctgttaccccggaagggtctatcggtaagctgtacccacggctgaagaatgacctaccgttaaccggctacctacttcgagaagcctagtaatgccgttgaagttttattgacgttacgctcagcacactaccccgtgtgtagttttggctgatgagtcacggcactccccacgggcgaccgtggccgtggctgcgttggcggccaaccaaggagtgcaagctccttggacgtcatattacagacatggtgtgaagagcctattgagctaggtggtagtcctccggcccctgaatgcggctaatcctaactccggagcatatcggtgcgaaccagcacttggtgtgttgtaatacgtaagtctggagcggaaccgactactttgggtgtccgtgtttcctgttttaacttttatggctgcttatggtgacaatttaacattgttaccatatagctgttgggttggccatccggattttgttataaaaccatttcctcgtgccttgacctttaacacatttgtgaacttctttaaatcccttttattagtccttaaatactaaga

SEQ ID NO: 23124 - DNA, 537 bp, synthetic construct
  source 1..537: mol_type = other DNA
agctgtacccacggctgaagaatgacctaccgttaaccggctacctacttcgagaagcctagtaatgccgttgaagttttattgacgttacgctcagcacactaccccgtgtgtagttttggctgatgagtcacggcactccccacgggcgaccgtggccgtggctgcgttggcggccaaccaaggagtgcaagctccttggacgtcatattacagacatggtgtgaagagcctattgagctaggtggtagtcctccggcccctgaatgcggctaatcctaactccggagcatatcggtgcgaaccagcacttggtgtgttgtaatacgtaagtctggagcggaaccgactactttgggtgtccgtgtttcctgttttaacttttatggctgcttatggtgacaatttaacattgttaccatatagctgttgggttggccatccggattttgttataaaaccatttcctcgtgccttgacctttaacacatttgtgaacttctttaaatcccttttattagtccttaaatactaaga

SEQ ID NO: 23125 - DNA, 688 bp, synthetic construct
  source 1..688: mol_type = other DNA
gtactctggtatcacggtacccttgtacgcctgttttatactcccctccccgtaatttagaagttcaaaacttaagttcaatagaagggggtacaaaccagtaccaccacgaacaagcacttctgtttccccggtgaggttgcatagactgtacccacggttgaaggcgactgatccgttatccgctcttgtacttcgggaagcccagtatcatcttcggatcttcgatgcgttgcgctcagcactcaaccccagagtgtagcttaggctgatgagtctggacaatcctcactggtgacagtggtccaggctgcgttggcggcctacctgtggcccaaagccacaggacgctagatgtgaacaaggtgtgaagagcccactgagctacaagagagtcctccggcccctgaatgcggctaatcccaaccacggagcaggtagttgcaaaccagcagccggcctgtcgtaacgcgcaagtctgtggcggaaccgactactttgggtgaccgtgtttccttttatcttttcaatggctgcttatggtgacaatcattgattgttatcataaagcgacttggattggccatccggtgaaatttaagtgcgtcagctatccatttattggatttaccccactaaaaccacatacgcctggccttagtgttgttggtgagacgctaccatcaaa

SEQ ID NO: 23126 - DNA, 638 bp, synthetic construct
  source 1..638: mol_type = other DNA
cgtaatttagaagttcaaaacttaagttcaatagaagggggtacaaaccagtaccaccacgaacaagcacttctgtttccccggtgaggttgcatagactgtacccacggttgaaggcgactgatccgttatccgctcttgtacttcgggaagcccagtatcatcttcggatcttcgatgcgttgcgctcagcactcaaccccagagtgtagcttaggctgatgagtctggacaatcctcactggtgacagtggtccaggctgcgttggcggcctacctgtggcccaaagccacaggacgctagatgtgaacaaggtgtgaagagcccactgagctacaagagagtcctccggcccctgaatgcggctaatcccaaccacggagcaggtagttgcaaaccagcagccggcctgtcgtaacgcgcaagtctgtggcggaaccgactactttgggtgaccgtgtttccttttatcttttcaatggctgcttatggtgacaatcattgattgttatcataaagcgacttggattggccatccggtgaaatttaagtgcgtcagctatccatttattggatttaccccactaaaaccacatacgcctggccttagtgttgttggtgagacgctaccatcaaa

SEQ ID NO: 23127 - DNA, 588 bp, synthetic construct
  source 1..588: mol_type = other DNA
gtaccaccacgaacaagcacttctgtttccccggtgaggttgcatagactgtacccacggttgaaggcgactgatccgttatccgctcttgtacttcgggaagcccagtatcatcttcggatcttcgatgcgttgcgctcagcactcaaccccagagtgtagcttaggctgatgagtctggacaatcctcactggtgacagtggtccaggctgcgttggcggcctacctgtggcccaaagccacaggacgctagatgtgaacaaggtgtgaagagcccactgagctacaagagagtcctccggcccctgaatgcggctaatcccaaccacggagcaggtagttgcaaaccagcagccggcctgtcgtaacgcgcaagtctgtggcggaaccgactactttgggtgaccgtgtttccttttatcttttcaatggctgcttatggtgacaatcattgattgttatcataaagcgacttggattggccatccggtgaaatttaagtgcgtcagctatccatttattggatttaccccactaaaaccacatacgcctggccttagtgttgttggtgagacgctaccatcaaa

SEQ ID NO: 23128 - DNA, 538 bp, synthetic construct
  source 1..538: mol_type = other DNA
gtacccacggttgaaggcgactgatccgttatccgctcttgtacttcgggaagcccagtatcatcttcggatcttcgatgcgttgcgctcagcactcaaccccagagtgtagcttaggctgatgagtctggacaatcctcactggtgacagtggtccaggctgcgttggcggcctacctgtggcccaaagccacaggacgctagatgtgaacaaggtgtgaagagcccactgagctacaagagagtcctccggcccctgaatgcggctaatcccaaccacggagcaggtagttgcaaaccagcagccggcctgtcgtaacgcgcaagtctgtggcggaaccgactactttgggtgaccgtgtttccttttatcttttcaatggctgcttatggtgacaatcattgattgttatcataaagcgacttggattggccatccggtgaaatttaagtgcgtcagctatccatttattggatttaccccactaaaaccacatacgcctggccttagtgttgttggtgagacgctaccatcaaa

SEQ ID NO: 23129 - DNA, 688 bp, synthetic construct
  source 1..688: mol_type = other DNA
ggtattccggtacctttgtgcgcctgttttatccaccccgtcccccactgtaacttagaagatatgcaaccctgatcaacagcaggtgtgacactccagtcacatcacgatcaagcacttctgttgccccggaccgagtatcaataagccactcgcgtggctgaaggagaaaacgttcgttatccgaccaactacttcgagaaacctagtaccaccctggaagttgcgtagcgtttcgctccacacaaccccagtgtagatcgggtcgatgagtcaccgcgttcctcacgggcgaccgtggcggtggctgcgttggcggcctgcccatggggcaacccatgggacgcttcaatactgacatggtgcgaagagtctattgagctagttggtggtcctccggcccctgaatgcggctaatcctaactgcggagcagatacccacatgccagtgggcgatctgtcgtaatgggtaactctgcagcggaaccgactactttgggtgtccgtgtttccttttattcttatattggctgcttatggtgacaattgagaagttgttaccatatagctattggattggccatccggtgacaaatagagcgattgtttatttgtttgttggatttataccactgaacttcaaggttttaaacaccctcaattttgtactagttcttaatacatcaaa

SEQ ID NO: 23130 - DNA, 638 bp, synthetic construct
  source 1..638: mol_type = other DNA
taacttagaagatatgcaaccctgatcaacagcaggtgtgacactccagtcacatcacgatcaagcacttctgttgccccggaccgagtatcaataagccactcgcgtggctgaaggagaaaacgttcgttatccgaccaactacttcgagaaacctagtaccaccctggaagttgcgtagcgtttcgctccacacaaccccagtgtagatcgggtcgatgagtcaccgcgttcctcacgggcgaccgtggcggtggctgcgttggcggcctgcccatggggcaacccatgggacgcttcaatactgacatggtgcgaagagtctattgagctagttggtggtcctccggcccctgaatgcggctaatcctaactgcggagcagatacccacatgccagtgggcgatctgtcgtaatgggtaactctgcagcggaaccgactactttgggtgtccgtgtttccttttattcttatattggctgcttatggtgacaattgagaagttgttaccatatagctattggattggccatccggtgacaaatagagcgattgtttatttgtttgttggatttataccactgaacttcaaggttttaaacaccctcaattttgtactagttcttaatacatcaaa

SEQ ID NO: 23131 - DNA, 588 bp, synthetic construct
  source 1..588: mol_type = other DNA
cacatcacgatcaagcacttctgttgccccggaccgagtatcaataagccactcgcgtggctgaaggagaaaacgttcgttatccgaccaactacttcgagaaacctagtaccaccctggaagttgcgtagcgtttcgctccacacaaccccagtgtagatcgggtcgatgagtcaccgcgttcctcacgggcgaccgtggcggtggctgcgttggcggcctgcccatggggcaacccatgggacgcttcaatactgacatggtgcgaagagtctattgagctagttggtggtcctccggcccctgaatgcggctaatcctaactgcggagcagatacccacatgccagtgggcgatctgtcgtaatgggtaactctgcagcggaaccgactactttgggtgtccgtgtttccttttattcttatattggctgcttatggtgacaattgagaagttgttaccatatagctattggattggccatccggtgacaaatagagcgattgtttatttgtttgttggatttataccactgaacttcaaggttttaaacaccctcaattttgtactagttcttaatacatcaaa

SEQ ID NO: 23132 - DNA, 538 bp, synthetic construct
  source 1..538: mol_type = other DNA
actcgcgtggctgaaggagaaaacgttcgttatccgaccaactacttcgagaaacctagtaccaccctggaagttgcgtagcgtttcgctccacacaaccccagtgtagatcgggtcgatgagtcaccgcgttcctcacgggcgaccgtggcggtggctgcgttggcggcctgcccatggggcaacccatgggacgcttcaatactgacatggtgcgaagagtctattgagctagttggtggtcctccggcccctgaatgcggctaatcctaactgcggagcagatacccacatgccagtgggcgatctgtcgtaatgggtaactctgcagcggaaccgactactttgggtgtccgtgtttccttttattcttatattggctgcttatggtgacaattgagaagttgttaccatatagctattggattggccatccggtgacaaatagagcgattgtttatttgtttgttggatttataccactgaacttcaaggttttaaacaccctcaattttgtactagttcttaatacatcaaa

SEQ ID NO: 23133 - DNA, 689 bp, synthetic construct
  source 1..689: mol_type = other DNA
ctggtgtcacggtacctttgtacgcctgttttataccccctcccccgtaacttagaagctataaaccaagttcaatagaagggggtacaagccagtaccaccacgaacaagtacttctgttaccccggtgacgttgtatagactgctcgcgcggtcgaaagcgacagatccgttacccgcttgtgtacttcgagaagtctagtaccaccttggaatcttcgatgcgttgcgctcagcactttaccccagagtgtagcttaggctgatgagtctgggcgctccccatcggcgacgatggcccaggctgcgttggcggcctacctatggctaacgccataggacgctagtagtgaacaaggtgtgaagaacctattgagctacacaagagtcctccggcccctgaatgcggctaatcctaaccatggagcaagtgatcacaatccagtgatattcttgtcgtaacgcgcaagtccgtggcggaaccgactactttgggtgtccgtgtttccctttatttttattatggctgcttatggtgacaatcattgattgttatcatagagcgaattggattggccatccggtgaaagtgaaactcattatctacttatttgttggattcactccatcaaacacattcacttatagtatcatcttgacagtgattagaattagacagtcgtatcaca

SEQ ID NO: 23134 - DNA, 639 bp, synthetic construct
  source 1..639: mol_type = other DNA
cttagaagctataaaccaagttcaatagaagggggtacaagccagtaccaccacgaacaagtacttctgttaccccggtgacgttgtatagactgctcgcgcggtcgaaagcgacagatccgttacccgcttgtgtacttcgagaagtctagtaccaccttggaatcttcgatgcgttgcgctcagcactttaccccagagtgtagcttaggctgatgagtctgggcgctccccatcggcgacgatggcccaggctgcgttggcggcctacctatggctaacgccataggacgctagtagtgaacaaggtgtgaagaacctattgagctacacaagagtcctccggcccctgaatgcggctaatcctaaccatggagcaagtgatcacaatccagtgatattcttgtcgtaacgcgcaagtccgtggcggaaccgactactttgggtgtccgtgtttccctttatttttattatggctgcttatggtgacaatcattgattgttatcatagagcgaattggattggccatccggtgaaagtgaaactcattatctacttatttgttggattcactccatcaaacacattcacttatagtatcatcttgacagtgattagaattagacagtcgtatcaca

SEQ ID NO: 23135 - DNA, 589 bp, synthetic construct
  source 1..589: mol_type = other DNA
ccacgaacaagtacttctgttaccccggtgacgttgtatagactgctcgcgcggtcgaaagcgacagatccgttacccgcttgtgtacttcgagaagtctagtaccaccttggaatcttcgatgcgttgcgctcagcactttaccccagagtgtagcttaggctgatgagtctgggcgctccccatcggcgacgatggcccaggctgcgttggcggcctacctatggctaacgccataggacgctagtagtgaacaaggtgtgaagaacctattgagctacacaagagtcctccggcccctgaatgcggctaatcctaaccatggagcaagtgatcacaatccagtgatattcttgtcgtaacgcgcaagtccgtggcggaaccgactactttgggtgtccgtgtttccctttatttttattatggctgcttatggtgacaatcattgattgttatcatagagcgaattggattggccatccggtgaaagtgaaactcattatctacttatttgttggattcactccatcaaacacattcacttatagtatcatcttgacagtgattagaattagacagtcgtatcaca

SEQ ID NO: 23136 - DNA, 539 bp, synthetic construct
  source 1..539: mol_type = other DNA
gcggtcgaaagcgacagatccgttacccgcttgtgtacttcgagaagtctagtaccaccttggaatcttcgatgcgttgcgctcagcactttaccccagagtgtagcttaggctgatgagtctgggcgctccccatcggcgacgatggcccaggctgcgttggcggcctacctatggctaacgccataggacgctagtagtgaacaaggtgtgaagaacctattgagctacacaagagtcctccggcccctgaatgcggctaatcctaaccatggagcaagtgatcacaatccagtgatattcttgtcgtaacgcgcaagtccgtggcggaaccgactactttgggtgtccgtgtttccctttatttttattatggctgcttatggtgacaatcattgattgttatcatagagcgaattggattggccatccggtgaaagtgaaactcattatctacttatttgttggattcactccatcaaacacattcacttatagtatcatcttgacagtgattagaattagacagtcgtatcaca

SEQ ID NO: 23137 - DNA, 689 bp, synthetic construct
  source 1..689: mol_type = other DNA
cacactggtattccggtacctttgtgcgcctgttttatacatcctacccccgtaacttagaagcaagatcacccgatcaccaggaaatgtggcaaaccagtcacattctgatcaagcacttctgtttccccggactgagtatcaataggctgttcacacggctgaaggagaaaacgttcgttacccggccaactacttcgaaaaacctagtatcaccgtgaacgttgcagagtgtttcgctcagcactttccccgtgtagatcaggtcgatgagtcaccgcattccccacgggcgaccgtggcggtggctgcgttggcggcctgcctgcggggcaacccgtaggacgctctaatacagacacggtgtgaagagtctattgagctagttggtagtcctccggcccctgaatgcggctaatcctaactgcggagcgagcgcttgtaatccaacaggtagctcgtcgtaacgggtaactctgcagcggaaccgactactttgggtgaccgtgtttccttttatttcattactggctgcttatggtgacaatcacagagttgttaccatatagctattggattggccatccggtgtcaaatagagcaattgtgtttctttttgttgggtttgtaccacttgacttgaccagctacaacactctgtgctacattgttagattgaacacagcaaa

SEQ ID NO: 23138 - DNA, 639 bp, synthetic construct
  source 1..639: mol_type = other DNA
cgtaacttagaagcaagatcacccgatcaccaggaaatgtggcaaaccagtcacattctgatcaagcacttctgtttccccggactgagtatcaataggctgttcacacggctgaaggagaaaacgttcgttacccggccaactacttcgaaaaacctagtatcaccgtgaacgttgcagagtgtttcgctcagcactttccccgtgtagatcaggtcgatgagtcaccgcattccccacgggcgaccgtggcggtggctgcgttggcggcctgcctgcggggcaacccgtaggacgctctaatacagacacggtgtgaagagtctattgagctagttggtagtcctccggcccctgaatgcggctaatcctaactgcggagcgagcgcttgtaatccaacaggtagctcgtcgtaacgggtaactctgcagcggaaccgactactttgggtgaccgtgtttccttttatttcattactggctgcttatggtgacaatcacagagttgttaccatatagctattggattggccatccggtgtcaaatagagcaattgtgtttctttttgttgggtttgtaccacttgacttgaccagctacaacactctgtgctacattgttagattgaacacagcaaa

SEQ ID NO: 23139 - DNA, 589 bp, synthetic construct
  source 1..589: mol_type = other DNA
tcacattctgatcaagcacttctgtttccccggactgagtatcaataggctgttcacacggctgaaggagaaaacgttcgttacccggccaactacttcgaaaaacctagtatcaccgtgaacgttgcagagtgtttcgctcagcactttccccgtgtagatcaggtcgatgagtcaccgcattccccacgggcgaccgtggcggtggctgcgttggcggcctgcctgcggggcaacccgtaggacgctctaatacagacacggtgtgaagagtctattgagctagttggtagtcctccggcccctgaatgcggctaatcctaactgcggagcgagcgcttgtaatccaacaggtagctcgtcgtaacgggtaactctgcagcggaaccgactactttgggtgaccgtgtttccttttatttcattactggctgcttatggtgacaatcacagagttgttaccatatagctattggattggccatccggtgtcaaatagagcaattgtgtttctttttgttgggtttgtaccacttgacttgaccagctacaacactctgtgctacattgttagattgaacacagcaaa

SEQ ID NO: 23140 - DNA, 539 bp, synthetic construct
  source 1..539: mol_type = other DNA
tgttcacacggctgaaggagaaaacgttcgttacccggccaactacttcgaaaaacctagtatcaccgtgaacgttgcagagtgtttcgctcagcactttccccgtgtagatcaggtcgatgagtcaccgcattccccacgggcgaccgtggcggtggctgcgttggcggcctgcctgcggggcaacccgtaggacgctctaatacagacacggtgtgaagagtctattgagctagttggtagtcctccggcccctgaatgcggctaatcctaactgcggagcgagcgcttgtaatccaacaggtagctcgtcgtaacgggtaactctgcagcggaaccgactactttgggtgaccgtgtttccttttatttcattactggctgcttatggtgacaatcacagagttgttaccatatagctattggattggccatccggtgtcaaatagagcaattgtgtttctttttgttgggtttgtaccacttgacttgaccagctacaacactctgtgctacattgttagattgaacacagcaaa

SEQ ID NO: 23141 - DNA, 690 bp, synthetic construct
  source 1..690: mol_type = other DNA
cactctggtacctcggtacctttgtgcgcctgttttatatcccccccccattgaaacttagaagcaatgcacttcgatcaatagcgggcgcggcgcaccagccacgtcatgatcaagcacttctgtttccccggaccgagtatcaatagactgctaacgcggttgagggagaaaacgtccgttacccggccaactgcttcgagaaatccagtaacatcatgaaaattgcagagtgtttcgctcagcacttccccagtgtagatcaggtcgatgagtcaccgcgttcctcacgggcgaccgtggcggtggctgcgttggcggcctgcctgtggggcaacccgcaggacgctctaatatggacatggtgtgaagaatctattgagccagttggtagtcctccggcccctgaatgcggctaatcctaactgcggagcacgcgccctcaatccagtgggtagcgtgtcgtaatgggtaactctgcagcggaaccgactactttgggtgtccgtgtttccttttattcttacattggctgcttatggtgacaattgagagattgttaccatatagctattggattggccatccggtatcgaatagagcggttatctatcaatttattggatttactccgttgagtgtgcagcagtatcgcactttgcttttaatagtgagactgaatagtgcaaa

SEQ ID NO: 23142 - DNA, 640 bp, synthetic construct
  source 1..640: mol_type = other DNA
ttgaaacttagaagcaatgcacttcgatcaatagcgggcgcggcgcaccagccacgtcatgatcaagcacttctgtttccccggaccgagtatcaatagactgctaacgcggttgagggagaaaacgtccgttacccggccaactgcttcgagaaatccagtaacatcatgaaaattgcagagtgtttcgctcagcacttccccagtgtagatcaggtcgatgagtcaccgcgttcctcacgggcgaccgtggcggtggctgcgttggcggcctgcctgtggggcaacccgcaggacgctctaatatggacatggtgtgaagaatctattgagccagttggtagtcctccggcccctgaatgcggctaatcctaactgcggagcacgcgccctcaatccagtgggtagcgtgtcgtaatgggtaactctgcagcggaaccgactactttgggtgtccgtgtttccttttattcttacattggctgcttatggtgacaattgagagattgttaccatatagctattggattggccatccggtatcgaatagagcggttatctatcaatttattggatttactccgttgagtgtgcagcagtatcgcactttgcttttaatagtgagactgaatagtgcaaa

SEQ ID NO: 23143 - DNA, 590 bp, synthetic construct
  source 1..590: mol_type = other DNA
gccacgtcatgatcaagcacttctgtttccccggaccgagtatcaatagactgctaacgcggttgagggagaaaacgtccgttacccggccaactgcttcgagaaatccagtaacatcatgaaaattgcagagtgtttcgctcagcacttccccagtgtagatcaggtcgatgagtcaccgcgttcctcacgggcgaccgtggcggtggctgcgttggcggcctgcctgtggggcaacccgcaggacgctctaatatggacatggtgtgaagaatctattgagccagttggtagtcctccggcccctgaatgcggctaatcctaactgcggagcacgcgccctcaatccagtgggtagcgtgtcgtaatgggtaactctgcagcggaaccgactactttgggtgtccgtgtttccttttattcttacattggctgcttatggtgacaattgagagattgttaccatatagctattggattggccatccggtatcgaatagagcggttatctatcaatttattggatttactccgttgagtgtgcagcagtatcgcactttgcttttaatagtgagactgaatagtgcaaa

SEQ ID NO: 23144 - DNA, 540 bp, synthetic construct
  source 1..540: mol_type = other DNA
ctgctaacgcggttgagggagaaaacgtccgttacccggccaactgcttcgagaaatccagtaacatcatgaaaattgcagagtgtttcgctcagcacttccccagtgtagatcaggtcgatgagtcaccgcgttcctcacgggcgaccgtggcggtggctgcgttggcggcctgcctgtggggcaacccgcaggacgctctaatatggacatggtgtgaagaatctattgagccagttggtagtcctccggcccctgaatgcggctaatcctaactgcggagcacgcgccctcaatccagtgggtagcgtgtcgtaatgggtaactctgcagcggaaccgactactttgggtgtccgtgtttccttttattcttacattggctgcttatggtgacaattgagagattgttaccatatagctattggattggccatccggtatcgaatagagcggttatctatcaatttattggatttactccgttgagtgtgcagcagtatcgcactttgcttttaatagtgagactgaatagtgcaaa

SEQ ID NO: 23145 - DNA, 690 bp, synthetic construct
  source 1..690: mol_type = other DNA
catggaatctttgtgcgcctgttttataacccttccccaatttgcaacttagaagtaatacacactacagatcaatagtaggcatggcgcgccagtcatgtctcgatcaagcacttctgtttccccggactgagtatcaatagactgcccacgcggttgaaggagaaaacgtccgttacccggctaactacttcgagaaacctagtagcaccaaataagctgcagagcgtttcgctcagcacctcccccgtgtagatcaggctgatgagtcactgcaatccccacgggcgaccgtggcagtggctgcgctggcggcctgcctatggggcaacccataggacgctctaatgtggacatggtgcgaagagtctattgagctagttagtagtcctccggcccctgaatgcggctaatcctaactgcggagcacataccttcaatccaggaggtggtgtgtcgtaacgggtaactctgcagcggaaccgactactttgggtgtccgtgtttccttttatccttatattggctgcttatggtgacaatcacggaattgttgccatatagctattggattggccatccggtgtctaatagagctattgtatacctatttgttggatttaccaagttaaatatcaccaactacaccacccttctttatattatattactgaatattagaaagagaaa

SEQ ID NO: 23146 - DNA, 640 bp, synthetic construct
  source 1..640: mol_type = other DNA
agaagtaatacacactacagatcaatagtaggcatggcgcgccagtcatgtctcgatcaagcacttctgtttccccggactgagtatcaatagactgcccacgcggttgaaggagaaaacgtccgttacccggctaactacttcgagaaacctagtagcaccaaataagctgcagagcgtttcgctcagcacctcccccgtgtagatcaggctgatgagtcactgcaatccccacgggcgaccgtggcagtggctgcgctggcggcctgcctatggggcaacccataggacgctctaatgtggacatggtgcgaagagtctattgagctagttagtagtcctccggcccctgaatgcggctaatcctaactgcggagcacataccttcaatccaggaggtggtgtgtcgtaacgggtaactctgcagcggaaccgactactttgggtgtccgtgtttccttttatccttatattggctgcttatggtgacaatcacggaattgttgccatatagctattggattggccatccggtgtctaatagagctattgtatacctatttgttggatttaccaagttaaatatcaccaactacaccacccttctttatattatattactgaatattagaaagagaaa

SEQ ID NO: 23147 - DNA, 590 bp, synthetic construct
  source 1..590: mol_type = other DNA
tctcgatcaagcacttctgtttccccggactgagtatcaatagactgcccacgcggttgaaggagaaaacgtccgttacccggctaactacttcgagaaacctagtagcaccaaataagctgcagagcgtttcgctcagcacctcccccgtgtagatcaggctgatgagtcactgcaatccccacgggcgaccgtggcagtggctgcgctggcggcctgcctatggggcaacccataggacgctctaatgtggacatggtgcgaagagtctattgagctagttagtagtcctccggcccctgaatgcggctaatcctaactgcggagcacataccttcaatccaggaggtggtgtgtcgtaacgggtaactctgcagcggaaccgactactttgggtgtccgtgtttccttttatccttatattggctgcttatggtgacaatcacggaattgttgccatatagctattggattggccatccggtgtctaatagagctattgtatacctatttgttggatttaccaagttaaatatcaccaactacaccacccttctttatattatattactgaatattagaaagagaaa

SEQ ID NO: 23148 - DNA, 540 bp, synthetic construct
  source 1..540: mol_type = other DNA
acgcggttgaaggagaaaacgtccgttacccggctaactacttcgagaaacctagtagcaccaaataagctgcagagcgtttcgctcagcacctcccccgtgtagatcaggctgatgagtcactgcaatccccacgggcgaccgtggcagtggctgcgctggcggcctgcctatggggcaacccataggacgctctaatgtggacatggtgcgaagagtctattgagctagttagtagtcctccggcccctgaatgcggctaatcctaactgcggagcacataccttcaatccaggaggtggtgtgtcgtaacgggtaactctgcagcggaaccgactactttgggtgtccgtgtttccttttatccttatattggctgcttatggtgacaatcacggaattgttgccatatagctattggattggccatccggtgtctaatagagctattgtatacctatttgttggatttaccaagttaaatatcaccaactacaccacccttctttatattatattactgaatattagaaagagaaa

SEQ ID NO: 23149 - DNA, 690 bp, synthetic construct
  source 1..690: mol_type = other DNA
cactctggtattacggtacctttgtgcgcctgttttacatcccttcccaatcgtaatttagaagccaaacactacgatcaatagtgggcgtggcacgccagccatgtctcgatcaagcactcctgtttccccgggccgagtatcaatagactgctcacgtggttgaaggagaaaacgctcgttatccggctaactacttcgagaaacctagtaacaccatggaagttgcagagtgtttcgttcagcacttccccagtgtagatcaggccgatgagtcaccgcgttccccacgggtgaccgtggcggtggctgcgttggcggcctgcccatggggtaacccatgggacgctctaatatggacatggtgtgaagagtctattgagctagttggtagtcctccggcccctgaatgcggctaatcctaactgcggagcatgtacctccaatccaggaggtggcgtgtcgtaatgggcaactctgcagcggaaccgactactttgggagtccgtgtttccttttattcttacactggctgcttatggtgacaattgagagattgttaccatatagctattggattggccatccggtgactaacagagcagttatctaccagttcgttggtttcattccattgtgtactcgcgaatacaacactcttcttttaatactagatttaaacaaagcaaa

SEQ ID NO: 23150 - DNA, 640 bp, synthetic construct
  source 1..640: mol_type = other DNA
tcgtaatttagaagccaaacactacgatcaatagtgggcgtggcacgccagccatgtctcgatcaagcactcctgtttccccgggccgagtatcaatagactgctcacgtggttgaaggagaaaacgctcgttatccggctaactacttcgagaaacctagtaacaccatggaagttgcagagtgtttcgttcagcacttccccagtgtagatcaggccgatgagtcaccgcgttccccacgggtgaccgtggcggtggctgcgttggcggcctgcccatggggtaacccatgggacgctctaatatggacatggtgtgaagagtctattgagctagttggtagtcctccggcccctgaatgcggctaatcctaactgcggagcatgtacctccaatccaggaggtggcgtgtcgtaatgggcaactctgcagcggaaccgactactttgggagtccgtgtttccttttattcttacactggctgcttatggtgacaattgagagattgttaccatatagctattggattggccatccggtgactaacagagcagttatctaccagttcgttggtttcattccattgtgtactcgcgaatacaacactcttcttttaatactagatttaaacaaagcaaa

SEQ ID NO: 23151 - DNA, 590 bp, synthetic construct
  source 1..590: mol_type = other DNA
gccatgtctcgatcaagcactcctgtttccccgggccgagtatcaatagactgctcacgtggttgaaggagaaaacgctcgttatccggctaactacttcgagaaacctagtaacaccatggaagttgcagagtgtttcgttcagcacttccccagtgtagatcaggccgatgagtcaccgcgttccccacgggtgaccgtggcggtggctgcgttggcggcctgcccatggggtaacccatgggacgctctaatatggacatggtgtgaagagtctattgagctagttggtagtcctccggcccctgaatgcggctaatcctaactgcggagcatgtacctccaatccaggaggtggcgtgtcgtaatgggcaactctgcagcggaaccgactactttgggagtccgtgtttccttttattcttacactggctgcttatggtgacaattgagagattgttaccatatagctattggattggccatccggtgactaacagagcagttatctaccagttcgttggtttcattccattgtgtactcgcgaatacaacactcttcttttaatactagatttaaacaaagcaaa

SEQ ID NO: 23152 - DNA, 540 bp, synthetic construct
  source 1..540: mol_type = other DNA
ctgctcacgtggttgaaggagaaaacgctcgttatccggctaactacttcgagaaacctagtaacaccatggaagttgcagagtgtttcgttcagcacttccccagtgtagatcaggccgatgagtcaccgcgttccccacgggtgaccgtggcggtggctgcgttggcggcctgcccatggggtaacccatgggacgctctaatatggacatggtgtgaagagtctattgagctagttggtagtcctccggcccctgaatgcggctaatcctaactgcggagcatgtacctccaatccaggaggtggcgtgtcgtaatgggcaactctgcagcggaaccgactactttgggagtccgtgtttccttttattcttacactggctgcttatggtgacaattgagagattgttaccatatagctattggattggccatccggtgactaacagagcagttatctaccagttcgttggtttcattccattgtgtactcgcgaatacaacactcttcttttaatactagatttaaacaaagcaaa

SEQ ID NO: 23153 - DNA, 691 bp, synthetic construct
  source 1..691: mol_type = other DNA
taatcctacgggattcttgtgcgcctgttttataaccccttccccgatttgtaacttagaagcaatttacattagcgatcaatagacgacatggcacgccagccatgtcttgatcaagcacttctgtttccccgggctgagtatcaatagactgcttacgcggttgaaggagaaaacgctcgttacccggctaactacttcgagaaacctagtagcatcatgaaaactgcagagcgtttcgttcagcactccccccgtgtagatcaggtcgatgagtcactgcaatccccacgggtgaccgtggcagtggctgcgttggcggcctgcctatggggcaacccataggacgctctaatgtggacatggtgcgaagagtctattgagctagttagtagtcctccggcccctgaatgcggctaatcctaactgcggagcgcatactcccaacccagggggtggtgcgtcgtaatgggcaactctgcagcggaaccgactactttgggtgtccgtgtttccttttatccttttattggctgcttatggtgacaattagagaattgttaccatatagctattggattggccatccggtgagcaacagagcaattgtgtatctttttgttggatacgtccccttgacacttagaacctacaacacgctacactatattctaatcttgaactcgagacg

SEQ ID NO: 23154 - DNA, 641 bp, synthetic construct
  source 1..641: mol_type = other DNA
gtaacttagaagcaatttacattagcgatcaatagacgacatggcacgccagccatgtcttgatcaagcacttctgtttccccgggctgagtatcaatagactgcttacgcggttgaaggagaaaacgctcgttacccggctaactacttcgagaaacctagtagcatcatgaaaactgcagagcgtttcgttcagcactccccccgtgtagatcaggtcgatgagtcactgcaatccccacgggtgaccgtggcagtggctgcgttggcggcctgcctatggggcaacccataggacgctctaatgtggacatggtgcgaagagtctattgagctagttagtagtcctccggcccctgaatgcggctaatcctaactgcggagcgcatactcccaacccagggggtggtgcgtcgtaatgggcaactctgcagcggaaccgactactttgggtgtccgtgtttccttttatccttttattggctgcttatggtgacaattagagaattgttaccatatagctattggattggccatccggtgagcaacagagcaattgtgtatctttttgttggatacgtccccttgacacttagaacctacaacacgctacactatattctaatcttgaactcgagacg

SEQ ID NO: 23155 - DNA, 591 bp, synthetic construct
  source 1..591: mol_type = other DNA
agccatgtcttgatcaagcacttctgtttccccgggctgagtatcaatagactgcttacgcggttgaaggagaaaacgctcgttacccggctaactacttcgagaaacctagtagcatcatgaaaactgcagagcgtttcgttcagcactccccccgtgtagatcaggtcgatgagtcactgcaatccccacgggtgaccgtggcagtggctgcgttggcggcctgcctatggggcaacccataggacgctctaatgtggacatggtgcgaagagtctattgagctagttagtagtcctccggcccctgaatgcggctaatcctaactgcggagcgcatactcccaacccagggggtggtgcgtcgtaatgggcaactctgcagcggaaccgactactttgggtgtccgtgtttccttttatccttttattggctgcttatggtgacaattagagaattgttaccatatagctattggattggccatccggtgagcaacagagcaattgtgtatctttttgttggatacgtccccttgacacttagaacctacaacacgctacactatattctaatcttgaactcgagacg

SEQ ID NO: 23156 - DNA, 541 bp, synthetic construct
  source 1..541: mol_type = other DNA
actgcttacgcggttgaaggagaaaacgctcgttacccggctaactacttcgagaaacctagtagcatcatgaaaactgcagagcgtttcgttcagcactccccccgtgtagatcaggtcgatgagtcactgcaatccccacgggtgaccgtggcagtggctgcgttggcggcctgcctatggggcaacccataggacgctctaatgtggacatggtgcgaagagtctattgagctagttagtagtcctccggcccctgaatgcggctaatcctaactgcggagcgcatactcccaacccagggggtggtgcgtcgtaatgggcaactctgcagcggaaccgactactttgggtgtccgtgtttccttttatccttttattggctgcttatggtgacaattagagaattgttaccatatagctattggattggccatccggtgagcaacagagcaattgtgtatctttttgttggatacgtccccttgacacttagaacctacaacacgctacactatattctaatcttgaactcgagacg

SEQ ID NO: 23157 - DNA, 691 bp, synthetic construct
  source 1..691: mol_type = other DNA
cactctggtatcgcggtacctttgtgcgcctgttttatgacccctccccaaccgaaacttagaagttacacataccgatcaatagtgggcatagcacgccagctgtgtcttgatcaagcacttctgtttccccggaccgagtatcaatagactgctcacgcggttgaaggagaaagcgttcgttatccggctaactacttcgagaaacctagtaacaccatgaaagttgcggagtgtttcgctcagcacttccccagtgtagatcaggtcgatgagtcaccgcgttccccacgggcgaccgtggcggtggctgcgctggcggcctgcctatgggatgacccataggacgcttcaacacagacatggtgtgaagagtctattgagctagttagtagtcctccggcccctgaatgcggctaatcctaactgcggagcacgtgccctcaagccagagggtggcgtgtcgtaacgggcaactctgcagcggaaccgactactttgggagtccgtgtttccttttattcttacactggctgcttatggtgacaattgagagattgttaccatatagctattggattggccatccggtgagcaacagagcgattgtatactcttttgtgggttttgtgccattaaatcttactgtgattaccacactgaaactcatcttgcagtttaatacagcaaa

SEQ ID NO: 23158 - DNA, 641 bp, synthetic construct
  source 1..641: mol_type = other DNA
accgaaacttagaagttacacataccgatcaatagtgggcatagcacgccagctgtgtcttgatcaagcacttctgtttccccggaccgagtatcaatagactgctcacgcggttgaaggagaaagcgttcgttatccggctaactacttcgagaaacctagtaacaccatgaaagttgcggagtgtttcgctcagcacttccccagtgtagatcaggtcgatgagtcaccgcgttccccacgggcgaccgtggcggtggctgcgctggcggcctgcctatgggatgacccataggacgcttcaacacagacatggtgtgaagagtctattgagctagttagtagtcctccggcccctgaatgcggctaatcctaactgcggagcacgtgccctcaagccagagggtggcgtgtcgtaacgggcaactctgcagcggaaccgactactttgggagtccgtgtttccttttattcttacactggctgcttatggtgacaattgagagattgttaccatatagctattggattggccatccggtgagcaacagagcgattgtatactcttttgtgggttttgtgccattaaatcttactgtgattaccacactgaaactcatcttgcagtttaatacagcaaa

SEQ ID NO: 23159 - DNA, 591 bp, synthetic construct
  source 1..591: mol_type = other DNA
agctgtgtcttgatcaagcacttctgtttccccggaccgagtatcaatagactgctcacgcggttgaaggagaaagcgttcgttatccggctaactacttcgagaaacctagtaacaccatgaaagttgcggagtgtttcgctcagcacttccccagtgtagatcaggtcgatgagtcaccgcgttccccacgggcgaccgtggcggtggctgcgctggcggcctgcctatgggatgacccataggacgcttcaacacagacatggtgtgaagagtctattgagctagttagtagtcctccggcccctgaatgcggctaatcctaactgcggagcacgtgccctcaagccagagggtggcgtgtcgtaacgggcaactctgcagcggaaccgactactttgggagtccgtgtttccttttattcttacactggctgcttatggtgacaattgagagattgttaccatatagctattggattggccatccggtgagcaacagagcgattgtatactcttttgtgggttttgtgccattaaatcttactgtgattaccacactgaaactcatcttgcagtttaatacagcaaa

SEQ ID NO: 23160 - DNA, 541 bp, synthetic construct
  source 1..541: mol_type = other DNA
actgctcacgcggttgaaggagaaagcgttcgttatccggctaactacttcgagaaacctagtaacaccatgaaagttgcggagtgtttcgctcagcacttccccagtgtagatcaggtcgatgagtcaccgcgttccccacgggcgaccgtggcggtggctgcgctggcggcctgcctatgggatgacccataggacgcttcaacacagacatggtgtgaagagtctattgagctagttagtagtcctccggcccctgaatgcggctaatcctaactgcggagcacgtgccctcaagccagagggtggcgtgtcgtaacgggcaactctgcagcggaaccgactactttgggagtccgtgtttccttttattcttacactggctgcttatggtgacaattgagagattgttaccatatagctattggattggccatccggtgagcaacagagcgattgtatactcttttgtgggttttgtgccattaaatcttactgtgattaccacactgaaactcatcttgcagtttaatacagcaaa

SEQ ID NO: 23161 - DNA, 691 bp, synthetic construct
  source 1..691: mol_type = other DNA
cactccgattctgcggaatctttgtgcgcctgttttataaccctcccccaacttgcaacttagaagttatgtacgttgatcaatagcaggcgtggcacaccagccatgtcttgatcaagcacttctgtaaccccggactgagtatcaatagactgctcacgtggtcgaaagagaaaatgttcgttatccggctaactacttcgagaaacctagtagcaccactgaaactgcggagtgtttcgctcagcacttcccccgtgtagatcaggtcgatgagtcactgcttaccccacgggtgaccgtggcagtggctgcgttggcggcctgcctatggggcaacccataggacgctctaaagtggacatggtgtgaagagtctattgagctagttagtagtcctccggcccctgaatgcggctaatcctaactgcggagcgcatgcccccaaaccagagggtggtgcgtcgtaacgggtaactctgcagcggaaccgactactttgggtgtccgtgtttcttttattctcataatggctgcttatggtgacaattgaggaattgttaccatatagctattggattggccatccggtgtgcaacagagctattatctacttgtttgttggatacattccattgacacctaaatccttcaatacattgcactatattctaacgttgaacgcaagaaa

SEQ ID NO: 23162 - DNA, 641 bp, synthetic construct
  source 1..641: mol_type = other DNA
acttgcaacttagaagttatgtacgttgatcaatagcaggcgtggcacaccagccatgtcttgatcaagcacttctgtaaccccggactgagtatcaatagactgctcacgtggtcgaaagagaaaatgttcgttatccggctaactacttcgagaaacctagtagcaccactgaaactgcggagtgtttcgctcagcacttcccccgtgtagatcaggtcgatgagtcactgcttaccccacgggtgaccgtggcagtggctgcgttggcggcctgcctatggggcaacccataggacgctctaaagtggacatggtgtgaagagtctattgagctagttagtagtcctccggcccctgaatgcggctaatcctaactgcggagcgcatgcccccaaaccagagggtggtgcgtcgtaacgggtaactctgcagcggaaccgactactttgggtgtccgtgtttcttttattctcataatggctgcttatggtgacaattgaggaattgttaccatatagctattggattggccatccggtgtgcaacagagctattatctacttgtttgttggatacattccattgacacctaaatccttcaatacattgcactatattctaacgttgaacgcaagaaa

SEQ ID NO: 23163 - DNA, 591 bp, synthetic construct
  source 1..591: mol_type = other DNA
cagccatgtcttgatcaagcacttctgtaaccccggactgagtatcaatagactgctcacgtggtcgaaagagaaaatgttcgttatccggctaactacttcgagaaacctagtagcaccactgaaactgcggagtgtttcgctcagcacttcccccgtgtagatcaggtcgatgagtcactgcttaccccacgggtgaccgtggcagtggctgcgttggcggcctgcctatggggcaacccataggacgctctaaagtggacatggtgtgaagagtctattgagctagttagtagtcctccggcccctgaatgcggctaatcctaactgcggagcgcatgcccccaaaccagagggtggtgcgtcgtaacgggtaactctgcagcggaaccgactactttgggtgtccgtgtttcttttattctcataatggctgcttatggtgacaattgaggaattgttaccatatagctattggattggccatccggtgtgcaacagagctattatctacttgtttgttggatacattccattgacacctaaatccttcaatacattgcactatattctaacgttgaacgcaagaaa

SEQ ID NO: 23164 - DNA, 541 bp, synthetic construct
  source 1..541: mol_type = other DNA
gactgctcacgtggtcgaaagagaaaatgttcgttatccggctaactacttcgagaaacctagtagcaccactgaaactgcggagtgtttcgctcagcacttcccccgtgtagatcaggtcgatgagtcactgcttaccccacgggtgaccgtggcagtggctgcgttggcggcctgcctatggggcaacccataggacgctctaaagtggacatggtgtgaagagtctattgagctagttagtagtcctccggcccctgaatgcggctaatcctaactgcggagcgcatgcccccaaaccagagggtggtgcgtcgtaacgggtaactctgcagcggaaccgactactttgggtgtccgtgtttcttttattctcataatggctgcttatggtgacaattgaggaattgttaccatatagctattggattggccatccggtgtgcaacagagctattatctacttgtttgttggatacattccattgacacctaaatccttcaatacattgcactatattctaacgttgaacgcaagaaa

SEQ ID NO: 23165 - DNA, 691 bp, synthetic construct
  source 1..691: mol_type = other DNA
acactggtatcacggtacccttgtgcgcctgttttatccacccgccccctatgtaacttagaagcacatcacaaacggtcaacaggcagctcagtaaaccaactgagccacgaccaggtacttctgttaccccggaccgagtatcaatagactgctgacgcggtcgaaggagaaaacgttcgttacccggccaactacttcgagaaacccagtaccaccatggaggttgcgtggcgtttcgctccacacaaccccagtgtagatcaggtcgatgagtcaccgcattccccacgggcgaccgtggcggtggctgcgttggcggcctgcccatgaggtaactcatgggacgctacaataccgacatggtgcgaagagtctattgagctagttggtagtcctccggcccctgaatgcggctaatcctaactgcagagcggacacctacaaaccagtgggcagtccgtcgtaacgggcaactctgcagcggaaccgactactttgggtgtccgtgtttccttttattctcatattggctgcttatggtgacaattgagagattgttgccatatagctattggattggccatccggtgactaacagagctattgtctacttatttgttggttacgcaccgctcaatttcaaagtcttaaacacgattaatttcatattatcactcaacacaacaaa

SEQ ID NO: 23166 - DNA, 641 bp, synthetic construct
  source 1..641: mol_type = other DNA
atgtaacttagaagcacatcacaaacggtcaacaggcagctcagtaaaccaactgagccacgaccaggtacttctgttaccccggaccgagtatcaatagactgctgacgcggtcgaaggagaaaacgttcgttacccggccaactacttcgagaaacccagtaccaccatggaggttgcgtggcgtttcgctccacacaaccccagtgtagatcaggtcgatgagtcaccgcattccccacgggcgaccgtggcggtggctgcgttggcggcctgcccatgaggtaactcatgggacgctacaataccgacatggtgcgaagagtctattgagctagttggtagtcctccggcccctgaatgcggctaatcctaactgcagagcggacacctacaaaccagtgggcagtccgtcgtaacgggcaactctgcagcggaaccgactactttgggtgtccgtgtttccttttattctcatattggctgcttatggtgacaattgagagattgttgccatatagctattggattggccatccggtgactaacagagctattgtctacttatttgttggttacgcaccgctcaatttcaaagtcttaaacacgattaatttcatattatcactcaacacaacaaa

SEQ ID NO: 23167 - DNA, 591 bp, synthetic construct
  source 1..591: mol_type = other DNA
aactgagccacgaccaggtacttctgttaccccggaccgagtatcaatagactgctgacgcggtcgaaggagaaaacgttcgttacccggccaactacttcgagaaacccagtaccaccatggaggttgcgtggcgtttcgctccacacaaccccagtgtagatcaggtcgatgagtcaccgcattccccacgggcgaccgtggcggtggctgcgttggcggcctgcccatgaggtaactcatgggacgctacaataccgacatggtgcgaagagtctattgagctagttggtagtcctccggcccctgaatgcggctaatcctaactgcagagcggacacctacaaaccagtgggcagtccgtcgtaacgggcaactctgcagcggaaccgactactttgggtgtccgtgtttccttttattctcatattggctgcttatggtgacaattgagagattgttgccatatagctattggattggccatccggtgactaacagagctattgtctacttatttgttggttacgcaccgctcaatttcaaagtcttaaacacgattaatttcatattatcactcaacacaacaaa

SEQ ID NO: 23168 - DNA, 541 bp, synthetic construct
  source 1..541: mol_type = other DNA
actgctgacgcggtcgaaggagaaaacgttcgttacccggccaactacttcgagaaacccagtaccaccatggaggttgcgtggcgtttcgctccacacaaccccagtgtagatcaggtcgatgagtcaccgcattccccacgggcgaccgtggcggtggctgcgttggcggcctgcccatgaggtaactcatgggacgctacaataccgacatggtgcgaagagtctattgagctagttggtagtcctccggcccctgaatgcggctaatcctaactgcagagcggacacctacaaaccagtgggcagtccgtcgtaacgggcaactctgcagcggaaccgactactttgggtgtccgtgtttccttttattctcatattggctgcttatggtgacaattgagagattgttgccatatagctattggattggccatccggtgactaacagagctattgtctacttatttgttggttacgcaccgctcaatttcaaagtcttaaacacgattaatttcatattatcactcaacacaacaaa

SEQ ID NO: 23169 - DNA, 691 bp, synthetic construct
  source 1..691: mol_type = other DNA
cactctggtatcacggtacctttgtgcgcctgttttacacacccccctccctaggaatttagaagcaatacacaatgatcaatagtaggcgtggtacgccaaccatgtcttgatcaagcacttctgttcccccggactgagtatcaatagactgctcacgcggttgaaggagaaaacgttcgttacccggccagctacttcgagaaacccagtaacaccatggaaatagcggggcgtttcgctcggcacatccccagtgtagatcaggtcgatgagtcaccgcattccccacgggtgaccgtggcggtggctgcgttggcggcctgcctacagggcgacctgtaggacgcttcaatatggacatggtgcgaagagtctattgagctagctggtagtcctccggcccctgaatgcggctaatcctaactgcggagcgcgcgcctccaatccagggggtggtgcgtcgtaatgggtaactctgcagcggaaccgactactttgggtgtccgtgtttccatttatccttatattggctgcttatggtgacaattgaaaggttgttaccatatagctattggattggccatccagtgtctaacagagcgattgtattcctcttcgttggatttgttccacttaacaaaacaaattaccaaactttgtgttatattgtcaaactaaacacagcaaa

SEQ ID NO: 23170 - DNA, 641 bp, synthetic construct
  source 1..641: mol_type = other DNA
ctaggaatttagaagcaatacacaatgatcaatagtaggcgtggtacgccaaccatgtcttgatcaagcacttctgttcccccggactgagtatcaatagactgctcacgcggttgaaggagaaaacgttcgttacccggccagctacttcgagaaacccagtaacaccatggaaatagcggggcgtttcgctcggcacatccccagtgtagatcaggtcgatgagtcaccgcattccccacgggtgaccgtggcggtggctgcgttggcggcctgcctacagggcgacctgtaggacgcttcaatatggacatggtgcgaagagtctattgagctagctggtagtcctccggcccctgaatgcggctaatcctaactgcggagcgcgcgcctccaatccagggggtggtgcgtcgtaatgggtaactctgcagcggaaccgactactttgggtgtccgtgtttccatttatccttatattggctgcttatggtgacaattgaaaggttgttaccatatagctattggattggccatccagtgtctaacagagcgattgtattcctcttcgttggatttgttccacttaacaaaacaaattaccaaactttgtgttatattgtcaaactaaacacagcaaa

SEQ ID NO: 23171 - DNA, 591 bp, synthetic construct
  source 1..591: mol_type = other DNA
aaccatgtcttgatcaagcacttctgttcccccggactgagtatcaatagactgctcacgcggttgaaggagaaaacgttcgttacccggccagctacttcgagaaacccagtaacaccatggaaatagcggggcgtttcgctcggcacatccccagtgtagatcaggtcgatgagtcaccgcattccccacgggtgaccgtggcggtggctgcgttggcggcctgcctacagggcgacctgtaggacgcttcaatatggacatggtgcgaagagtctattgagctagctggtagtcctccggcccctgaatgcggctaatcctaactgcggagcgcgcgcctccaatccagggggtggtgcgtcgtaatgggtaactctgcagcggaaccgactactttgggtgtccgtgtttccatttatccttatattggctgcttatggtgacaattgaaaggttgttaccatatagctattggattggccatccagtgtctaacagagcgattgtattcctcttcgttggatttgttccacttaacaaaacaaattaccaaactttgtgttatattgtcaaactaaacacagcaaa

SEQ ID NO: 23172 - DNA, 541 bp, synthetic construct
  source 1..541: mol_type = other DNA
actgctcacgcggttgaaggagaaaacgttcgttacccggccagctacttcgagaaacccagtaacaccatggaaatagcggggcgtttcgctcggcacatccccagtgtagatcaggtcgatgagtcaccgcattccccacgggtgaccgtggcggtggctgcgttggcggcctgcctacagggcgacctgtaggacgcttcaatatggacatggtgcgaagagtctattgagctagctggtagtcctccggcccctgaatgcggctaatcctaactgcggagcgcgcgcctccaatccagggggtggtgcgtcgtaatgggtaactctgcagcggaaccgactactttgggtgtccgtgtttccatttatccttatattggctgcttatggtgacaattgaaaggttgttaccatatagctattggattggccatccagtgtctaacagagcgattgtattcctcttcgttggatttgttccacttaacaaaacaaattaccaaactttgtgttatattgtcaaactaaacacagcaaa

SEQ ID NO: 23173 - DNA, 691 bp, synthetic construct
  source 1..691: mol_type = other DNA
cacactggtatcgcggtacctttgtgcgcctgttttatttaccctgccctgatgtaacttagaagcatgacaccaacgatcaatagcaggctcaatgcaccaattgggtcaagatcaagcacttctgttaccccggactgagtatcaataagctgctagcgcggctgaaggagaaaaagttcgttacccggccagctacttcgagaaacctagtatcaccatgaaagttgcgtggcgtttcgctccgcacaaccccagtgtagatcaggtcgatgagtcaccgcattccccacgggcgaccgtggcggtggctgcgttggcggcctgcccgtggagcaatccatgggacgctataatacagacatggtgtgaagagtctattgagctagctggtagtcctccggcccctgaatgcggctaatcctaactgcggagcaggtacccacgaaccagtgggcagtctgtcgtaatgggcaactccgcagcggaaccgactactttgggtgtccgtgtttccttttatttcaacttggctgcttatggtgacaattgagagattgttaccatatagctattggattggccatccggtgactaacagagctatcatatacctttttattggctttgtgccacttactctgaaagaggtcaagactctgcattatatcatactattgaatgctataaa

SEQ ID NO: 23174 - DNA, 641 bp, synthetic construct
  source 1..641: mol_type = other DNA
gatgtaacttagaagcatgacaccaacgatcaatagcaggctcaatgcaccaattgggtcaagatcaagcacttctgttaccccggactgagtatcaataagctgctagcgcggctgaaggagaaaaagttcgttacccggccagctacttcgagaaacctagtatcaccatgaaagttgcgtggcgtttcgctccgcacaaccccagtgtagatcaggtcgatgagtcaccgcattccccacgggcgaccgtggcggtggctgcgttggcggcctgcccgtggagcaatccatgggacgctataatacagacatggtgtgaagagtctattgagctagctggtagtcctccggcccctgaatgcggctaatcctaactgcggagcaggtacccacgaaccagtgggcagtctgtcgtaatgggcaactccgcagcggaaccgactactttgggtgtccgtgtttccttttatttcaacttggctgcttatggtgacaattgagagattgttaccatatagctattggattggccatccggtgactaacagagctatcatatacctttttattggctttgtgccacttactctgaaagaggtcaagactctgcattatatcatactattgaatgctataaa

SEQ ID NO: 23175 - DNA, 591 bp, synthetic construct
  source 1..591: mol_type = other DNA
caattgggtcaagatcaagcacttctgttaccccggactgagtatcaataagctgctagcgcggctgaaggagaaaaagttcgttacccggccagctacttcgagaaacctagtatcaccatgaaagttgcgtggcgtttcgctccgcacaaccccagtgtagatcaggtcgatgagtcaccgcattccccacgggcgaccgtggcggtggctgcgttggcggcctgcccgtggagcaatccatgggacgctataatacagacatggtgtgaagagtctattgagctagctggtagtcctccggcccctgaatgcggctaatcctaactgcggagcaggtacccacgaaccagtgggcagtctgtcgtaatgggcaactccgcagcggaaccgactactttgggtgtccgtgtttccttttatttcaacttggctgcttatggtgacaattgagagattgttaccatatagctattggattggccatccggtgactaacagagctatcatatacctttttattggctttgtgccacttactctgaaagaggtcaagactctgcattatatcatactattgaatgctataaa

SEQ ID NO: 23176 - DNA, 541 bp, synthetic construct
  source 1..541: mol_type = other DNA
agctgctagcgcggctgaaggagaaaaagttcgttacccggccagctacttcgagaaacctagtatcaccatgaaagttgcgtggcgtttcgctccgcacaaccccagtgtagatcaggtcgatgagtcaccgcattccccacgggcgaccgtggcggtggctgcgttggcggcctgcccgtggagcaatccatgggacgctataatacagacatggtgtgaagagtctattgagctagctggtagtcctccggcccctgaatgcggctaatcctaactgcggagcaggtacccacgaaccagtgggcagtctgtcgtaatgggcaactccgcagcggaaccgactactttgggtgtccgtgtttccttttatttcaacttggctgcttatggtgacaattgagagattgttaccatatagctattggattggccatccggtgactaacagagctatcatatacctttttattggctttgtgccacttactctgaaagaggtcaagactctgcattatatcatactattgaatgctataaa

SEQ ID NO: 23177 - DNA, 691 bp, synthetic construct
  source 1..691: mol_type = other DNA
cacaccggtatcacggtacccttgtgcgcctgttttatccacctcccccgttgtaacttagaagctcaatacaaatggtcgatagccagcccgatacgccaattgggttttgaccaagcacttctgttaccccggactgagtaccaataggctgccaaagcggctgaaggggaaaacgttcgttaccccaccaactacttcgagaaacctagtaccaccatgaagattgcgcagcgtttcgctcagcacaaccccagtgtagatcaggtcgatgagtcaccgcattccccacaggcgactgtggcggtggctgcgttggcggcctgcccatggggctacccatgggacacttcaatatcgacatggtgcgaagagtctattgagctagttggtagtcctccggcccctgaatgcggataatcctaactgcggagcaggcacccacaagccagtgggcagcctgtcgtaacgggcaactctgcagcggaaccgactactttgggtgtccgtgtttctttttattcttacactggctgcttatggtgacaattgaagaattgttaccatatagctattggattggccatccagcgactaacagagctattatcttcttgtttgtggggtacgtaccactcaatttcacagtagtaaggactctcaatttcattttgtgcttgaataaggcgaa

SEQ ID NO: 23178 - DNA, 641 bp, synthetic construct
  source 1..641: mol_type = other DNA
ttgtaacttagaagctcaatacaaatggtcgatagccagcccgatacgccaattgggttttgaccaagcacttctgttaccccggactgagtaccaataggctgccaaagcggctgaaggggaaaacgttcgttaccccaccaactacttcgagaaacctagtaccaccatgaagattgcgcagcgtttcgctcagcacaaccccagtgtagatcaggtcgatgagtcaccgcattccccacaggcgactgtggcggtggctgcgttggcggcctgcccatggggctacccatgggacacttcaatatcgacatggtgcgaagagtctattgagctagttggtagtcctccggcccctgaatgcggataatcctaactgcggagcaggcacccacaagccagtgggcagcctgtcgtaacgggcaactctgcagcggaaccgactactttgggtgtccgtgtttctttttattcttacactggctgcttatggtgacaattgaagaattgttaccatatagctattggattggccatccagcgactaacagagctattatcttcttgtttgtggggtacgtaccactcaatttcacagtagtaaggactctcaatttcattttgtgcttgaataaggcgaa

SEQ ID NO: 23179 - DNA, 591 bp, synthetic construct
  source 1..591: mol_type = other DNA
aattgggttttgaccaagcacttctgttaccccggactgagtaccaataggctgccaaagcggctgaaggggaaaacgttcgttaccccaccaactacttcgagaaacctagtaccaccatgaagattgcgcagcgtttcgctcagcacaaccccagtgtagatcaggtcgatgagtcaccgcattccccacaggcgactgtggcggtggctgcgttggcggcctgcccatggggctacccatgggacacttcaatatcgacatggtgcgaagagtctattgagctagttggtagtcctccggcccctgaatgcggataatcctaactgcggagcaggcacccacaagccagtgggcagcctgtcgtaacgggcaactctgcagcggaaccgactactttgggtgtccgtgtttctttttattcttacactggctgcttatggtgacaattgaagaattgttaccatatagctattggattggccatccagcgactaacagagctattatcttcttgtttgtggggtacgtaccactcaatttcacagtagtaaggactctcaatttcattttgtgcttgaataaggcgaa

SEQ ID NO: 23180 - DNA, 541 bp, synthetic construct
  source 1..541: mol_type = other DNA
gctgccaaagcggctgaaggggaaaacgttcgttaccccaccaactacttcgagaaacctagtaccaccatgaagattgcgcagcgtttcgctcagcacaaccccagtgtagatcaggtcgatgagtcaccgcattccccacaggcgactgtggcggtggctgcgttggcggcctgcccatggggctacccatgggacacttcaatatcgacatggtgcgaagagtctattgagctagttggtagtcctccggcccctgaatgcggataatcctaactgcggagcaggcacccacaagccagtgggcagcctgtcgtaacgggcaactctgcagcggaaccgactactttgggtgtccgtgtttctttttattcttacactggctgcttatggtgacaattgaagaattgttaccatatagctattggattggccatccagcgactaacagagctattatcttcttgtttgtggggtacgtaccactcaatttcacagtagtaaggactctcaatttcattttgtgcttgaataaggcgaa

SEQ ID NO: 23181 - DNA, 691 bp, synthetic construct
  source 1..691: mol_type = other DNA
cacactggtatcacggtacctttgtgcgcctgttttataatcccttccccaccgtaacatagaagctacacacactgatcaacagcaggcacagcacaccagttgtgtctcgatcaagcacttctgtctccccggaccgagtatcaatagactgcttacgcggttgaaggagaaaacgttcgtcacccggctgactacttcgaaaagcctagtagtaccatgaatgttgcggagtgtttcgctcagcacttcccccgtgtagatcaggctgatgagtcactgcattccccacgggtgaccgtggcagtggctgcgttggcggcctgcccatggggcaacccatgggacgcttcaatacagacatggtgcgaagagtctattgagctagtcagtagtcctccggcccctgaatgcggctaatcctaactgcggagcatgcgcctccgacccagggggtagcatgtcgtaatgggcaactctgcagcggaaccgactactttgggtgtccgtgtttccttttattcttatattggctgcttatggtgacaattgagagattgttgccatatagctattggattggccatccggtgagtaatagagctattatatactcctttgtgggttttgtgccactggatcacaaggtcttgaaaactctcacttttgtcataatactaaacactgcaaa

SEQ ID NO: 23182 - DNA, 641 bp, synthetic construct
  source 1..641: mol_type = other DNA
accgtaacatagaagctacacacactgatcaacagcaggcacagcacaccagttgtgtctcgatcaagcacttctgtctccccggaccgagtatcaatagactgcttacgcggttgaaggagaaaacgttcgtcacccggctgactacttcgaaaagcctagtagtaccatgaatgttgcggagtgtttcgctcagcacttcccccgtgtagatcaggctgatgagtcactgcattccccacgggtgaccgtggcagtggctgcgttggcggcctgcccatggggcaacccatgggacgcttcaatacagacatggtgcgaagagtctattgagctagtcagtagtcctccggcccctgaatgcggctaatcctaactgcggagcatgcgcctccgacccagggggtagcatgtcgtaatgggcaactctgcagcggaaccgactactttgggtgtccgtgtttccttttattcttatattggctgcttatggtgacaattgagagattgttgccatatagctattggattggccatccggtgagtaatagagctattatatactcctttgtgggttttgtgccactggatcacaaggtcttgaaaactctcacttttgtcataatactaaacactgcaaa

SEQ ID NO: 23183 - DNA, 591 bp, synthetic construct
  source 1..591: mol_type = other DNA
agttgtgtctcgatcaagcacttctgtctccccggaccgagtatcaatagactgcttacgcggttgaaggagaaaacgttcgtcacccggctgactacttcgaaaagcctagtagtaccatgaatgttgcggagtgtttcgctcagcacttcccccgtgtagatcaggctgatgagtcactgcattccccacgggtgaccgtggcagtggctgcgttggcggcctgcccatggggcaacccatgggacgcttcaatacagacatggtgcgaagagtctattgagctagtcagtagtcctccggcccctgaatgcggctaatcctaactgcggagcatgcgcctccgacccagggggtagcatgtcgtaatgggcaactctgcagcggaaccgactactttgggtgtccgtgtttccttttattcttatattggctgcttatggtgacaattgagagattgttgccatatagctattggattggccatccggtgagtaatagagctattatatactcctttgtgggttttgtgccactggatcacaaggtcttgaaaactctcacttttgtcataatactaaacactgcaaa

SEQ ID NO: 23184 - DNA, 541 bp, synthetic construct
  source 1..541: mol_type = other DNA
actgcttacgcggttgaaggagaaaacgttcgtcacccggctgactacttcgaaaagcctagtagtaccatgaatgttgcggagtgtttcgctcagcacttcccccgtgtagatcaggctgatgagtcactgcattccccacgggtgaccgtggcagtggctgcgttggcggcctgcccatggggcaacccatgggacgcttcaatacagacatggtgcgaagagtctattgagctagtcagtagtcctccggcccctgaatgcggctaatcctaactgcggagcatgcgcctccgacccagggggtagcatgtcgtaatgggcaactctgcagcggaaccgactactttgggtgtccgtgtttccttttattcttatattggctgcttatggtgacaattgagagattgttgccatatagctattggattggccatccggtgagtaatagagctattatatactcctttgtgggttttgtgccactggatcacaaggtcttgaaaactctcacttttgtcataatactaaacactgcaaa

SEQ ID NO: 23185 - DNA, 691 bp, synthetic construct
  source 1..691: mol_type = other DNA
acactgatatcacggtacctttgtgcgcctgttttatctacccctccccgatgcaacttagaagcatgttacaaacggtcaataggtggttcagttaaccaactgagcctcgaccaagcacttctgttaccccggactgagtatcaataggctgctcgcgtggctgatggagaaaacgtccgttacccggccaattacttcgagaaacctagtaccaccatggaagttgcgcagcgtttcgctccgcacaaccccagtgtagatcaggtcgatgagtcactgcgttccccacgggtgaccgtggcagtggctgcgttggcggcctgcccatggggtatcccatgggacgcttcaatactgacatggtgtgaagagtctattgagctaattggtagtcctccggcccctgaatgcggctaatcctaactgcggagcagatacccacgcaccagtgggcagtctgtcgtaacgggcaactctgcagcggaaccgactactttgggtgaccgtgtttccttttattttaatattggctgcttatggtgacaattgaaagattgttgccatatagctattggattggccatccggtaacaaacagagcaattatttacctgtttattggttttatacctctcaaccacaaggttataagtactctcaaccttgttttagcatttaacacagcaaa

SEQ ID NO: 23186 - DNA, 641 bp, synthetic construct
  source 1..641: mol_type = other DNA
atgcaacttagaagcatgttacaaacggtcaataggtggttcagttaaccaactgagcctcgaccaagcacttctgttaccccggactgagtatcaataggctgctcgcgtggctgatggagaaaacgtccgttacccggccaattacttcgagaaacctagtaccaccatggaagttgcgcagcgtttcgctccgcacaaccccagtgtagatcaggtcgatgagtcactgcgttccccacgggtgaccgtggcagtggctgcgttggcggcctgcccatggggtatcccatgggacgcttcaatactgacatggtgtgaagagtctattgagctaattggtagtcctccggcccctgaatgcggctaatcctaactgcggagcagatacccacgcaccagtgggcagtctgtcgtaacgggcaactctgcagcggaaccgactactttgggtgaccgtgtttccttttattttaatattggctgcttatggtgacaattgaaagattgttgccatatagctattggattggccatccggtaacaaacagagcaattatttacctgtttattggttttatacctctcaaccacaaggttataagtactctcaaccttgttttagcatttaacacagcaaa

SEQ ID NO: 23187 - DNA, 591 bp, synthetic construct
  source 1..591: mol_type = other DNA
aactgagcctcgaccaagcacttctgttaccccggactgagtatcaataggctgctcgcgtggctgatggagaaaacgtccgttacccggccaattacttcgagaaacctagtaccaccatggaagttgcgcagcgtttcgctccgcacaaccccagtgtagatcaggtcgatgagtcactgcgttccccacgggtgaccgtggcagtggctgcgttggcggcctgcccatggggtatcccatgggacgcttcaatactgacatggtgtgaagagtctattgagctaattggtagtcctccggcccctgaatgcggctaatcctaactgcggagcagatacccacgcaccagtgggcagtctgtcgtaacgggcaactctgcagcggaaccgactactttgggtgaccgtgtttccttttattttaatattggctgcttatggtgacaattgaaagattgttgccatatagctattggattggccatccggtaacaaacagagcaattatttacctgtttattggttttatacctctcaaccacaaggttataagtactctcaaccttgttttagcatttaacacagcaaa

SEQ ID NO: 23188 - DNA, 541 bp, synthetic construct
  source 1..541: mol_type = other DNA
gctgctcgcgtggctgatggagaaaacgtccgttacccggccaattacttcgagaaacctagtaccaccatggaagttgcgcagcgtttcgctccgcacaaccccagtgtagatcaggtcgatgagtcactgcgttccccacgggtgaccgtggcagtggctgcgttggcggcctgcccatggggtatcccatgggacgcttcaatactgacatggtgtgaagagtctattgagctaattggtagtcctccggcccctgaatgcggctaatcctaactgcggagcagatacccacgcaccagtgggcagtctgtcgtaacgggcaactctgcagcggaaccgactactttgggtgaccgtgtttccttttattttaatattggctgcttatggtgacaattgaaagattgttgccatatagctattggattggccatccggtaacaaacagagcaattatttacctgtttattggttttatacctctcaaccacaaggttataagtactctcaaccttgttttagcatttaacacagcaaa

SEQ ID NO: 23189 - DNA, 691 bp, synthetic construct
  source 1..691: mol_type = other DNA
catactggtatcacggtacctttatgcgcctgttttatccacccctccccaacgtaacctagaagacactcatggatgatcaataggaggctcggcatgccagctgagtctggatcaagcacttctgttgccccggaccgagtatcaataggctgctcacgcggctgaaggagaaaaagttcgttatccggccaattacttcgagaaacccagtaccaccatgaaggttgcgtggcgtttcgctccgcacagccccagtgtagatcaggtcgatgagtcaccgcgttccccacgggcgaccgtggcggtggctgcgttggcggcctgcccatggggtaacccatgggacgcttcaatactgacatggtgcgaagagtctattgagctaattggtagtcctccggcccctgaatgcggctaatcctaactgcggagcagacgtccacaaaccagtgggtggtctgtcgtaacgggcaactctgcagcggaaccgactactttgggtgtccgtgtttcctttattcttatattggctgcttatggtgacaattgagagattgttgccatatagctattggattggccatccggtttgcaatagagcgattatactcctctttgttgggtttgtacctctcaacctcaatagttacaggacattattatacattatccagctgaacacgaaaag

SEQ ID NO: 23190 - DNA, 641 bp, synthetic construct
  source 1..641: mol_type = other DNA
aacgtaacctagaagacactcatggatgatcaataggaggctcggcatgccagctgagtctggatcaagcacttctgttgccccggaccgagtatcaataggctgctcacgcggctgaaggagaaaaagttcgttatccggccaattacttcgagaaacccagtaccaccatgaaggttgcgtggcgtttcgctccgcacagccccagtgtagatcaggtcgatgagtcaccgcgttccccacgggcgaccgtggcggtggctgcgttggcggcctgcccatggggtaacccatgggacgcttcaatactgacatggtgcgaagagtctattgagctaattggtagtcctccggcccctgaatgcggctaatcctaactgcggagcagacgtccacaaaccagtgggtggtctgtcgtaacgggcaactctgcagcggaaccgactactttgggtgtccgtgtttcctttattcttatattggctgcttatggtgacaattgagagattgttgccatatagctattggattggccatccggtttgcaatagagcgattatactcctctttgttgggtttgtacctctcaacctcaatagttacaggacattattatacattatccagctgaacacgaaaag

SEQ ID NO: 23191 - DNA, 591 bp, synthetic construct
  source 1..591: mol_type = other DNA
cagctgagtctggatcaagcacttctgttgccccggaccgagtatcaataggctgctcacgcggctgaaggagaaaaagttcgttatccggccaattacttcgagaaacccagtaccaccatgaaggttgcgtggcgtttcgctccgcacagccccagtgtagatcaggtcgatgagtcaccgcgttccccacgggcgaccgtggcggtggctgcgttggcggcctgcccatggggtaacccatgggacgcttcaatactgacatggtgcgaagagtctattgagctaattggtagtcctccggcccctgaatgcggctaatcctaactgcggagcagacgtccacaaaccagtgggtggtctgtcgtaacgggcaactctgcagcggaaccgactactttgggtgtccgtgtttcctttattcttatattggctgcttatggtgacaattgagagattgttgccatatagctattggattggccatccggtttgcaatagagcgattatactcctctttgttgggtttgtacctctcaacctcaatagttacaggacattattatacattatccagctgaacacgaaaag

SEQ ID NO: 23192 - DNA, 541 bp, synthetic construct
  source 1..541: mol_type = other DNA
ggctgctcacgcggctgaaggagaaaaagttcgttatccggccaattacttcgagaaacccagtaccaccatgaaggttgcgtggcgtttcgctccgcacagccccagtgtagatcaggtcgatgagtcaccgcgttccccacgggcgaccgtggcggtggctgcgttggcggcctgcccatggggtaacccatgggacgcttcaatactgacatggtgcgaagagtctattgagctaattggtagtcctccggcccctgaatgcggctaatcctaactgcggagcagacgtccacaaaccagtgggtggtctgtcgtaacgggcaactctgcagcggaaccgactactttgggtgtccgtgtttcctttattcttatattggctgcttatggtgacaattgagagattgttgccatatagctattggattggccatccggtttgcaatagagcgattatactcctctttgttgggtttgtacctctcaacctcaatagttacaggacattattatacattatccagctgaacacgaaaag

SEQ ID NO: 23193 - DNA, 691 bp, synthetic construct
  source 1..691: mol_type = other DNA
acactggtatcacggtacctttgtgcgcctgttttatttaccctcccccaacgtaacttagaagcatgactcaaatggtcaacagacaactcagcatgccagctgagcctcgaccaagcacttctgttaccccggactgagtaccagtaagctgctcacgcggctgagagggaaaccgttcgttacccggccaattacttcgagaaacctagtaccaccatgaaagttgcgcagtgtttcgctccgcacaaccccagtgtagatcaggtcgatgagtcaccgcaaaccccacgggtgaccgtggcggtggctgcgctggcggcctgcccatggggcagcccatgggacgcttcaatactgacatggtgcgaagagtctattgagctaattggtgatcctccggcccctgaatgcggctaatcctaactgcggagcagatacccacgcaccagtgggcagtctgtcgtaatgggcaactctgcagcggaaccgactactttgggtgtccgtgtttccttttattcttatactggctgcttatggtgacaattgagagattgttgccatatagctattggattggccatccggttacaaacagagcaattacttacctatttgttggttttgtaccactgaactacaaagtcttgaacaccctcaatttcattacaacacctaacacgttaaa

SEQ ID NO: 23194 - DNA, 641 bp, synthetic construct
  source 1..641: mol_type = other DNA
acgtaacttagaagcatgactcaaatggtcaacagacaactcagcatgccagctgagcctcgaccaagcacttctgttaccccggactgagtaccagtaagctgctcacgcggctgagagggaaaccgttcgttacccggccaattacttcgagaaacctagtaccaccatgaaagttgcgcagtgtttcgctccgcacaaccccagtgtagatcaggtcgatgagtcaccgcaaaccccacgggtgaccgtggcggtggctgcgctggcggcctgcccatggggcagcccatgggacgcttcaatactgacatggtgcgaagagtctattgagctaattggtgatcctccggcccctgaatgcggctaatcctaactgcggagcagatacccacgcaccagtgggcagtctgtcgtaatgggcaactctgcagcggaaccgactactttgggtgtccgtgtttccttttattcttatactggctgcttatggtgacaattgagagattgttgccatatagctattggattggccatccggttacaaacagagcaattacttacctatttgttggttttgtaccactgaactacaaagtcttgaacaccctcaatttcattacaacacctaacacgttaaa

SEQ ID NO: 23195 - DNA, 591 bp, synthetic construct
  source 1..591: mol_type = other DNA
agctgagcctcgaccaagcacttctgttaccccggactgagtaccagtaagctgctcacgcggctgagagggaaaccgttcgttacccggccaattacttcgagaaacctagtaccaccatgaaagttgcgcagtgtttcgctccgcacaaccccagtgtagatcaggtcgatgagtcaccgcaaaccccacgggtgaccgtggcggtggctgcgctggcggcctgcccatggggcagcccatgggacgcttcaatactgacatggtgcgaagagtctattgagctaattggtgatcctccggcccctgaatgcggctaatcctaactgcggagcagatacccacgcaccagtgggcagtctgtcgtaatgggcaactctgcagcggaaccgactactttgggtgtccgtgtttccttttattcttatactggctgcttatggtgacaattgagagattgttgccatatagctattggattggccatccggttacaaacagagcaattacttacctatttgttggttttgtaccactgaactacaaagtcttgaacaccctcaatttcattacaacacctaacacgttaaa

SEQ ID NO: 23196 - DNA, 541 bp, synthetic construct
  source 1..541: mol_type = other DNA
gctgctcacgcggctgagagggaaaccgttcgttacccggccaattacttcgagaaacctagtaccaccatgaaagttgcgcagtgtttcgctccgcacaaccccagtgtagatcaggtcgatgagtcaccgcaaaccccacgggtgaccgtggcggtggctgcgctggcggcctgcccatggggcagcccatgggacgcttcaatactgacatggtgcgaagagtctattgagctaattggtgatcctccggcccctgaatgcggctaatcctaactgcggagcagatacccacgcaccagtgggcagtctgtcgtaatgggcaactctgcagcggaaccgactactttgggtgtccgtgtttccttttattcttatactggctgcttatggtgacaattgagagattgttgccatatagctattggattggccatccggttacaaacagagcaattacttacctatttgttggttttgtaccactgaactacaaagtcttgaacaccctcaatttcattacaacacctaacacgttaaa

SEQ ID NO: 23197 - DNA, 691 bp, synthetic construct
  source 1..691: mol_type = other DNA
cacactggtatcatggtacctttgtgtgcctgttttatttcccttccccagatgcaacttagaagcaacactccacgaccactagcaggcgtggcacaccagccatgtcttggtcaagcacttctgtaaccccggactgagtatcaataaactgctcacgcggtcgaaggagaaaacgtccgttacccggccaactacttcgagaaacctagtaacgccatgaaaattgcgaggtgtttcgctcagcacatccccagtgtagatcaggtcgatgagtcaccgcattccccacaggtaactgtggcggtggctgcgttggcggcctgcccatggggtgacccatgggacgcttcaatacggacatggtgtgaagagtctattgagctagttggtagtcctccggcccctgaatgcggctaatcctaactgtggagcatgcgcccccactccagagggtagcgtgtcgtaacgggtaactccgcagcggaaccgactactttgggtgtccgtgtttctttttattcttatattggctgcttatggtgacaattgaaagattgttaccatatagctattggattggccacccagtgacaaacagagcaataatttaccaatttgtgggatttattccaataagtttgaaagtcttgaagacacttaatctagtattacaactcaatagcgcaaa

SEQ ID NO: 23198 - DNA, 641 bp, synthetic construct
  source 1..641: mol_type = other DNA
gatgcaacttagaagcaacactccacgaccactagcaggcgtggcacaccagccatgtcttggtcaagcacttctgtaaccccggactgagtatcaataaactgctcacgcggtcgaaggagaaaacgtccgttacccggccaactacttcgagaaacctagtaacgccatgaaaattgcgaggtgtttcgctcagcacatccccagtgtagatcaggtcgatgagtcaccgcattccccacaggtaactgtggcggtggctgcgttggcggcctgcccatggggtgacccatgggacgcttcaatacggacatggtgtgaagagtctattgagctagttggtagtcctccggcccctgaatgcggctaatcctaactgtggagcatgcgcccccactccagagggtagcgtgtcgtaacgggtaactccgcagcggaaccgactactttgggtgtccgtgtttctttttattcttatattggctgcttatggtgacaattgaaagattgttaccatatagctattggattggccacccagtgacaaacagagcaataatttaccaatttgtgggatttattccaataagtttgaaagtcttgaagacacttaatctagtattacaactcaatagcgcaaa

SEQ ID NO: 23199 - DNA, 591 bp, synthetic construct
  source 1..591: mol_type = other DNA
agccatgtcttggtcaagcacttctgtaaccccggactgagtatcaataaactgctcacgcggtcgaaggagaaaacgtccgttacccggccaactacttcgagaaacctagtaacgccatgaaaattgcgaggtgtttcgctcagcacatccccagtgtagatcaggtcgatgagtcaccgcattccccacaggtaactgtggcggtggctgcgttggcggcctgcccatggggtgacccatgggacgcttcaatacggacatggtgtgaagagtctattgagctagttggtagtcctccggcccctgaatgcggctaatcctaactgtggagcatgcgcccccactccagagggtagcgtgtcgtaacgggtaactccgcagcggaaccgactactttgggtgtccgtgtttctttttattcttatattggctgcttatggtgacaattgaaagattgttaccatatagctattggattggccacccagtgacaaacagagcaataatttaccaatttgtgggatttattccaataagtttgaaagtcttgaagacacttaatctagtattacaactcaatagcgcaaa

SEQ ID NO: 23200 - DNA, 541 bp, synthetic construct
  source 1..541: mol_type = other DNA
actgctcacgcggtcgaaggagaaaacgtccgttacccggccaactacttcgagaaacctagtaacgccatgaaaattgcgaggtgtttcgctcagcacatccccagtgtagatcaggtcgatgagtcaccgcattccccacaggtaactgtggcggtggctgcgttggcggcctgcccatggggtgacccatgggacgcttcaatacggacatggtgtgaagagtctattgagctagttggtagtcctccggcccctgaatgcggctaatcctaactgtggagcatgcgcccccactccagagggtagcgtgtcgtaacgggtaactccgcagcggaaccgactactttgggtgtccgtgtttctttttattcttatattggctgcttatggtgacaattgaaagattgttaccatatagctattggattggccacccagtgacaaacagagcaataatttaccaatttgtgggatttattccaataagtttgaaagtcttgaagacacttaatctagtattacaactcaatagcgcaaa

SEQ ID NO: 23201 - DNA, 691 bp, synthetic construct
  source 1..691: mol_type = other DNA
cacactggtattacggtacctttgtgcgcctgttttatacacccttaccctatgcaatatagaagcaaaacgacaaggtcaatagagagcccagtgagccaactgggtcgagaccaagcacttctgtttccccggaccgagtatcaataggctgcttacgcggctgaaggagaaaacgttcgttacccggctaactacttcgaaaaacctagtaacgccatggaagttgcgaaccgtttcgctcggcacttccccagtgtagatcaggtcgatgagtcaccgcattccccacgggcgaccgtggcggtggctgcgttggcggcctgcctatggggcaacccataggacgcttcaatatggacatggcgtgaagagtctattgagctagttagtagtcctccggcccctgaatgcggctaatcctaactgcggagcacatgcccccaacccaggaggtggtgtgtcgtaatgggtaactctgcagcggaaccgactactttgggtgtccgtgtttccttttatcccaatgttggctgcttatggtgacaattgaaagattgttaccatatagctattggattggccatccggtgactaacagagcaatcgtttacctattcattggttacgttccattaaatctcaaggaactaacgactctcaattacattttgctcttgaactctgcaaa

SEQ ID NO: 23202 - DNA, 641 bp, synthetic construct
  source 1..641: mol_type = other DNA
tatgcaatatagaagcaaaacgacaaggtcaatagagagcccagtgagccaactgggtcgagaccaagcacttctgtttccccggaccgagtatcaataggctgcttacgcggctgaaggagaaaacgttcgttacccggctaactacttcgaaaaacctagtaacgccatggaagttgcgaaccgtttcgctcggcacttccccagtgtagatcaggtcgatgagtcaccgcattccccacgggcgaccgtggcggtggctgcgttggcggcctgcctatggggcaacccataggacgcttcaatatggacatggcgtgaagagtctattgagctagttagtagtcctccggcccctgaatgcggctaatcctaactgcggagcacatgcccccaacccaggaggtggtgtgtcgtaatgggtaactctgcagcggaaccgactactttgggtgtccgtgtttccttttatcccaatgttggctgcttatggtgacaattgaaagattgttaccatatagctattggattggccatccggtgactaacagagcaatcgtttacctattcattggttacgttccattaaatctcaaggaactaacgactctcaattacattttgctcttgaactctgcaaa

SEQ ID NO: 23203 - DNA, 591 bp, synthetic construct
  source 1..591: mol_type = other DNA
aactgggtcgagaccaagcacttctgtttccccggaccgagtatcaataggctgcttacgcggctgaaggagaaaacgttcgttacccggctaactacttcgaaaaacctagtaacgccatggaagttgcgaaccgtttcgctcggcacttccccagtgtagatcaggtcgatgagtcaccgcattccccacgggcgaccgtggcggtggctgcgttggcggcctgcctatggggcaacccataggacgcttcaatatggacatggcgtgaagagtctattgagctagttagtagtcctccggcccctgaatgcggctaatcctaactgcggagcacatgcccccaacccaggaggtggtgtgtcgtaatgggtaactctgcagcggaaccgactactttgggtgtccgtgtttccttttatcccaatgttggctgcttatggtgacaattgaaagattgttaccatatagctattggattggccatccggtgactaacagagcaatcgtttacctattcattggttacgttccattaaatctcaaggaactaacgactctcaattacattttgctcttgaactctgcaaa

SEQ ID NO: 23204 - DNA, 541 bp, synthetic construct
  source 1..541: mol_type = other DNA
gctgcttacgcggctgaaggagaaaacgttcgttacccggctaactacttcgaaaaacctagtaacgccatggaagttgcgaaccgtttcgctcggcacttccccagtgtagatcaggtcgatgagtcaccgcattccccacgggcgaccgtggcggtggctgcgttggcggcctgcctatggggcaacccataggacgcttcaatatggacatggcgtgaagagtctattgagctagttagtagtcctccggcccctgaatgcggctaatcctaactgcggagcacatgcccccaacccaggaggtggtgtgtcgtaatgggtaactctgcagcggaaccgactactttgggtgtccgtgtttccttttatcccaatgttggctgcttatggtgacaattgaaagattgttaccatatagctattggattggccatccggtgactaacagagcaatcgtttacctattcattggttacgttccattaaatctcaaggaactaacgactctcaattacattttgctcttgaactctgcaaa

SEQ ID NO: 23205 - DNA, 691 bp, synthetic construct
  source 1..691: mol_type = other DNA
cactctggtatcacggtacctttgtgcgcctgttttacatcccctccccaaattgtaatttagaagtctcacacaccgatcaatagcaagcgtggcacaccagccatgttttgatcaagcacttctgttacccggactgagtatcaatagaccgctaacgcggttgaaggagaaaacgttcgttacccggccaactacttcgaaaaacctagtaacaccatggaagttgcggagtgtttcgctcagcactaccccagtgtagatcaggtcgatgagtcaccgcgttccccacgggcgaccgtggcggtggctgcgttggcggcctgcctacggggaaacccgtaggacgctctaatacagacatggtgcgaagagtctattgagctagttggtaatcctccggcccctgaatgcggctaatcctaactgcggagcacataccctcaaaccagggggcagtgtgtcgtaacgggcaactctgcagcggaaccgactactttgggtgtccgtgtttcattttattcctatactggctgcttatggtgacaattgacgggttgttaccatatagttattggattggccatccggtgactaacagagcaattatatatctctttgttgggtttataccacttagcttgaaagaggttaaaacactacatctcatcattaaactaaatacaacaaa

SEQ ID NO: 23206 - DNA, 641 bp, synthetic construct
  source 1..641: mol_type = other DNA
aattgtaatttagaagtctcacacaccgatcaatagcaagcgtggcacaccagccatgttttgatcaagcacttctgttacccggactgagtatcaatagaccgctaacgcggttgaaggagaaaacgttcgttacccggccaactacttcgaaaaacctagtaacaccatggaagttgcggagtgtttcgctcagcactaccccagtgtagatcaggtcgatgagtcaccgcgttccccacgggcgaccgtggcggtggctgcgttggcggcctgcctacggggaaacccgtaggacgctctaatacagacatggtgcgaagagtctattgagctagttggtaatcctccggcccctgaatgcggctaatcctaactgcggagcacataccctcaaaccagggggcagtgtgtcgtaacgggcaactctgcagcggaaccgactactttgggtgtccgtgtttcattttattcctatactggctgcttatggtgacaattgacgggttgttaccatatagttattggattggccatccggtgactaacagagcaattatatatctctttgttgggtttataccacttagcttgaaagaggttaaaacactacatctcatcattaaactaaatacaacaaa

SEQ ID NO: 23207 - DNA, 591 bp, synthetic construct
  source 1..591: mol_type = other DNA
cagccatgttttgatcaagcacttctgttacccggactgagtatcaatagaccgctaacgcggttgaaggagaaaacgttcgttacccggccaactacttcgaaaaacctagtaacaccatggaagttgcggagtgtttcgctcagcactaccccagtgtagatcaggtcgatgagtcaccgcgttccccacgggcgaccgtggcggtggctgcgttggcggcctgcctacggggaaacccgtaggacgctctaatacagacatggtgcgaagagtctattgagctagttggtaatcctccggcccctgaatgcggctaatcctaactgcggagcacataccctcaaaccagggggcagtgtgtcgtaacgggcaactctgcagcggaaccgactactttgggtgtccgtgtttcattttattcctatactggctgcttatggtgacaattgacgggttgttaccatatagttattggattggccatccggtgactaacagagcaattatatatctctttgttgggtttataccacttagcttgaaagaggttaaaacactacatctcatcattaaactaaatacaacaaa

SEQ ID NO: 23208 - DNA, 541 bp, synthetic construct
  source 1..541: mol_type = other DNA
accgctaacgcggttgaaggagaaaacgttcgttacccggccaactacttcgaaaaacctagtaacaccatggaagttgcggagtgtttcgctcagcactaccccagtgtagatcaggtcgatgagtcaccgcgttccccacgggcgaccgtggcggtggctgcgttggcggcctgcctacggggaaacccgtaggacgctctaatacagacatggtgcgaagagtctattgagctagttggtaatcctccggcccctgaatgcggctaatcctaactgcggagcacataccctcaaaccagggggcagtgtgtcgtaacgggcaactctgcagcggaaccgactactttgggtgtccgtgtttcattttattcctatactggctgcttatggtgacaattgacgggttgttaccatatagttattggattggccatccggtgactaacagagcaattatatatctctttgttgggtttataccacttagcttgaaagaggttaaaacactacatctcatcattaaactaaatacaacaaa

SEQ ID NO: 23209 - DNA, 691 bp, synthetic construct
  source 1..691: mol_type = other DNA
actctggtatcacggtacctttgtgcgcctgttttatacacccttcccaagtgtaacttagaagcttaccacacacggtcaataggcgactcagtaagccaactgggtcttgatcaagcacttctgtttccccggactgagtatcaataagctgctcacgcggctgaaggagaaaacgttcgttaaccggccaattacttcgagaaacctagtaacaccatggaggttgcgcagcgtttcgctccgcacaaccccagtgtagatcaggccgatgagtcaccgcactcctcacgggcgaccgtggcggtggctgcgctggcggcctgcccatggggtaacccatgggacgcttcaatactgacatggtgcgaagagtctattgagctaattggtagtcctccggcccctgaatgcggctaatcctaactgcggagcagatacccacatgccagtgggcagtctgtcgtaatgggcaactctgcagcggaaccgactactttgggtgtccgtgtttccttttattcttatactggctgcttatggtgacaattgagagattgttaccatatagctattggattggccatccagtgacaaacagagcgattatttatttgtttgttggttatatcccattaagccaaaaagtcttagccactctcaatttcatactattgcttaatacaacgaa

SEQ ID NO: 23210 - DNA, 641 bp, synthetic construct
  source 1..641: mol_type = other DNA
gtgtaacttagaagcttaccacacacggtcaataggcgactcagtaagccaactgggtcttgatcaagcacttctgtttccccggactgagtatcaataagctgctcacgcggctgaaggagaaaacgttcgttaaccggccaattacttcgagaaacctagtaacaccatggaggttgcgcagcgtttcgctccgcacaaccccagtgtagatcaggccgatgagtcaccgcactcctcacgggcgaccgtggcggtggctgcgctggcggcctgcccatggggtaacccatgggacgcttcaatactgacatggtgcgaagagtctattgagctaattggtagtcctccggcccctgaatgcggctaatcctaactgcggagcagatacccacatgccagtgggcagtctgtcgtaatgggcaactctgcagcggaaccgactactttgggtgtccgtgtttccttttattcttatactggctgcttatggtgacaattgagagattgttaccatatagctattggattggccatccagtgacaaacagagcgattatttatttgtttgttggttatatcccattaagccaaaaagtcttagccactctcaatttcatactattgcttaatacaacgaa

SEQ ID NO: 23211 - DNA, 591 bp, synthetic construct
  source 1..591: mol_type = other DNA
aactgggtcttgatcaagcacttctgtttccccggactgagtatcaataagctgctcacgcggctgaaggagaaaacgttcgttaaccggccaattacttcgagaaacctagtaacaccatggaggttgcgcagcgtttcgctccgcacaaccccagtgtagatcaggccgatgagtcaccgcactcctcacgggcgaccgtggcggtggctgcgctggcggcctgcccatggggtaacccatgggacgcttcaatactgacatggtgcgaagagtctattgagctaattggtagtcctccggcccctgaatgcggctaatcctaactgcggagcagatacccacatgccagtgggcagtctgtcgtaatgggcaactctgcagcggaaccgactactttgggtgtccgtgtttccttttattcttatactggctgcttatggtgacaattgagagattgttaccatatagctattggattggccatccagtgacaaacagagcgattatttatttgtttgttggttatatcccattaagccaaaaagtcttagccactctcaatttcatactattgcttaatacaacgaa

SEQ ID NO: 23212 - DNA, 541 bp, synthetic construct
  source 1..541: mol_type = other DNA
gctgctcacgcggctgaaggagaaaacgttcgttaaccggccaattacttcgagaaacctagtaacaccatggaggttgcgcagcgtttcgctccgcacaaccccagtgtagatcaggccgatgagtcaccgcactcctcacgggcgaccgtggcggtggctgcgctggcggcctgcccatggggtaacccatgggacgcttcaatactgacatggtgcgaagagtctattgagctaattggtagtcctccggcccctgaatgcggctaatcctaactgcggagcagatacccacatgccagtgggcagtctgtcgtaatgggcaactctgcagcggaaccgactactttgggtgtccgtgtttccttttattcttatactggctgcttatggtgacaattgagagattgttaccatatagctattggattggccatccagtgacaaacagagcgattatttatttgtttgttggttatatcccattaagccaaaaagtcttagccactctcaatttcatactattgcttaatacaacgaa

SEQ ID NO: 23213 - DNA, 692 bp, synthetic construct
  source 1..692: mol_type = other DNA
cacactggtatcccggtacctttgtgcgcctgttttatctacccctccccaagtgaaacttagaagatcatcacatatggtcaataggcggctcagtacaccaactgcgtctcgaccaagcacttctgtatccccggactgagtatcaatagactgctcacgcggttgaaggagaaaacgttcgttatccggctaactacttcgggaagcctagtagcaccttgaaagttgcggagtgtttcgctcagcacttcccccgtgtagatcaggccgatgagccactgtaaaccccacgggcgaccgtgacagtggctgcgctggcggcctgcccatgggggaacccatgggacgctctaatactgacatggtgtgaagagtctactgagctagttagtagtcctccggcccctgaatgcggctaatcctaactgcggagcacacaccctcaacccagggggcagtgtgtcgtaatgggtaactctgcagcggaaccgactactttgggtgaccgtgtttccttttattccttattggctgcttatggtgacaattgaaaagttgttaccatatagctattggattggccatccggtatctaatagagctattgtttacttatttattggatacgtccctcttaatttcaaggctatccaaactcttgattatatattgctccttaattataagaa

SEQ ID NO: 23214 - DNA, 642 bp, synthetic construct
  source 1..642: mol_type = other DNA
aagtgaaacttagaagatcatcacatatggtcaataggcggctcagtacaccaactgcgtctcgaccaagcacttctgtatccccggactgagtatcaatagactgctcacgcggttgaaggagaaaacgttcgttatccggctaactacttcgggaagcctagtagcaccttgaaagttgcggagtgtttcgctcagcacttcccccgtgtagatcaggccgatgagccactgtaaaccccacgggcgaccgtgacagtggctgcgctggcggcctgcccatgggggaacccatgggacgctctaatactgacatggtgtgaagagtctactgagctagttagtagtcctccggcccctgaatgcggctaatcctaactgcggagcacacaccctcaacccagggggcagtgtgtcgtaatgggtaactctgcagcggaaccgactactttgggtgaccgtgtttccttttattccttattggctgcttatggtgacaattgaaaagttgttaccatatagctattggattggccatccggtatctaatagagctattgtttacttatttattggatacgtccctcttaatttcaaggctatccaaactcttgattatatattgctccttaattataagaa

SEQ ID NO: 23215 - DNA, 592 bp, synthetic construct
  source 1..592: mol_type = other DNA
ccaactgcgtctcgaccaagcacttctgtatccccggactgagtatcaatagactgctcacgcggttgaaggagaaaacgttcgttatccggctaactacttcgggaagcctagtagcaccttgaaagttgcggagtgtttcgctcagcacttcccccgtgtagatcaggccgatgagccactgtaaaccccacgggcgaccgtgacagtggctgcgctggcggcctgcccatgggggaacccatgggacgctctaatactgacatggtgtgaagagtctactgagctagttagtagtcctccggcccctgaatgcggctaatcctaactgcggagcacacaccctcaacccagggggcagtgtgtcgtaatgggtaactctgcagcggaaccgactactttgggtgaccgtgtttccttttattccttattggctgcttatggtgacaattgaaaagttgttaccatatagctattggattggccatccggtatctaatagagctattgtttacttatttattggatacgtccctcttaatttcaaggctatccaaactcttgattatatattgctccttaattataagaa

SEQ ID NO: 23216 - DNA, 542 bp, synthetic construct
  source 1..542: mol_type = other DNA
agactgctcacgcggttgaaggagaaaacgttcgttatccggctaactacttcgggaagcctagtagcaccttgaaagttgcggagtgtttcgctcagcacttcccccgtgtagatcaggccgatgagccactgtaaaccccacgggcgaccgtgacagtggctgcgctggcggcctgcccatgggggaacccatgggacgctctaatactgacatggtgtgaagagtctactgagctagttagtagtcctccggcccctgaatgcggctaatcctaactgcggagcacacaccctcaacccagggggcagtgtgtcgtaatgggtaactctgcagcggaaccgactactttgggtgaccgtgtttccttttattccttattggctgcttatggtgacaattgaaaagttgttaccatatagctattggattggccatccggtatctaatagagctattgtttacttatttattggatacgtccctcttaatttcaaggctatccaaactcttgattatatattgctccttaattataagaa

SEQ ID NO: 23217 - DNA, 692 bp, synthetic construct
  source 1..692: mol_type = other DNA
tacactggtatctcggtacctttgtacgcctgttttataccccctccctgatttgcaacttagaagcaacgcaaaccagatcaatagtaggtgtgacataccagtcgcatcttgatcaagcacttctgtatccccggaccgagtatcaatagactgtgcacacggttgaaggagaaaacgtccgttacccggctaactacttcgagaaacctagtaacgccattgaagttgcagagtgtttcgctcagcactccccccgtgtagatcaggtcgatgagtcaccgcattccccacgggcgaccgtggcggtggctgcgttggcggcctgcccatggggtaacccatgggacgctctaatatagacatggtgcgaagagtctattgagctagttagcagacctccggcccctgaatgcggctaatcctaactgcggagcgcgcaccctcaacccagggggcggcgtgtcgtaatgggtaactctgcagcggaaccgactactttgggtgtccgtgtttccttttattctttattggctgcttatggtgacaattgaaaagttgttaccatatagctattggattggccatccggtgtctaacagagctattgtctacctatttattggatacgtccctcttaatctcaaggccattcaaactcttgattatatattgctcctcaactgtaggaa

SEQ ID NO: 23218 - DNA, 642 bp, synthetic construct
  source 1..642: mol_type = other DNA
atttgcaacttagaagcaacgcaaaccagatcaatagtaggtgtgacataccagtcgcatcttgatcaagcacttctgtatccccggaccgagtatcaatagactgtgcacacggttgaaggagaaaacgtccgttacccggctaactacttcgagaaacctagtaacgccattgaagttgcagagtgtttcgctcagcactccccccgtgtagatcaggtcgatgagtcaccgcattccccacgggcgaccgtggcggtggctgcgttggcggcctgcccatggggtaacccatgggacgctctaatatagacatggtgcgaagagtctattgagctagttagcagacctccggcccctgaatgcggctaatcctaactgcggagcgcgcaccctcaacccagggggcggcgtgtcgtaatgggtaactctgcagcggaaccgactactttgggtgtccgtgtttccttttattctttattggctgcttatggtgacaattgaaaagttgttaccatatagctattggattggccatccggtgtctaacagagctattgtctacctatttattggatacgtccctcttaatctcaaggccattcaaactcttgattatatattgctcctcaactgtaggaa

SEQ ID NO: 23219 - DNA, 592 bp, synthetic construct
  source 1..592: mol_type = other DNA
ccagtcgcatcttgatcaagcacttctgtatccccggaccgagtatcaatagactgtgcacacggttgaaggagaaaacgtccgttacccggctaactacttcgagaaacctagtaacgccattgaagttgcagagtgtttcgctcagcactccccccgtgtagatcaggtcgatgagtcaccgcattccccacgggcgaccgtggcggtggctgcgttggcggcctgcccatggggtaacccatgggacgctctaatatagacatggtgcgaagagtctattgagctagttagcagacctccggcccctgaatgcggctaatcctaactgcggagcgcgcaccctcaacccagggggcggcgtgtcgtaatgggtaactctgcagcggaaccgactactttgggtgtccgtgtttccttttattctttattggctgcttatggtgacaattgaaaagttgttaccatatagctattggattggccatccggtgtctaacagagctattgtctacctatttattggatacgtccctcttaatctcaaggccattcaaactcttgattatatattgctcctcaactgtaggaa

SEQ ID NO: 23220 - DNA, 542 bp, synthetic construct
  source 1..542: mol_type = other DNA
agactgtgcacacggttgaaggagaaaacgtccgttacccggctaactacttcgagaaacctagtaacgccattgaagttgcagagtgtttcgctcagcactccccccgtgtagatcaggtcgatgagtcaccgcattccccacgggcgaccgtggcggtggctgcgttggcggcctgcccatggggtaacccatgggacgctctaatatagacatggtgcgaagagtctattgagctagttagcagacctccggcccctgaatgcggctaatcctaactgcggagcgcgcaccctcaacccagggggcggcgtgtcgtaatgggtaactctgcagcggaaccgactactttgggtgtccgtgtttccttttattctttattggctgcttatggtgacaattgaaaagttgttaccatatagctattggattggccatccggtgtctaacagagctattgtctacctatttattggatacgtccctcttaatctcaaggccattcaaactcttgattatatattgctcctcaactgtaggaa

SEQ ID NO: 23221 - DNA, 692 bp, synthetic construct
  source 1..692: mol_type = other DNA
gcactctggtattacggtacctttgtgcgcctgttttataacccctccccaactgtaaattagaagcaacacacgtcgatcaatagtaggcgtgacgcaccagtcacgtcttgatcaagcacttctgtttccccggaccgagtatcaatagactgctcacgcggttgaaggagaaaacgttcgttacccgaccaactacttcgaaaaacctagtagcaccatgaaggttgcggagtgtttcgctcggcacttccccagtgtagatcaggtcgatgagtcaccgcattccccacgggcgaccgtggcggtggctgcgctggcggcctgcctatggggtaacccataggacgctctaatacggacatggtgcgaagagtctattgagctagttggtagtcctccggcccctgaatgcggctaatcctaactgcggagcgcgcgcccccattccaggaggtagcgcgtcgtaacgggcaactctgcagcggaaccgactactttgggtgtccgtgtttccttttatctttattctggctgcttatggtgacaattgacagattgttaccatatagctattggattggccatccggtcacaagcagagcgattatctaccaatttattggatttatcccactgcacactcgtgaatataacacattactgctgatactgagtttggacaaagcaaa

SEQ ID NO: 23222 - DNA, 642 bp, synthetic construct
  source 1..642: mol_type = other DNA
aactgtaaattagaagcaacacacgtcgatcaatagtaggcgtgacgcaccagtcacgtcttgatcaagcacttctgtttccccggaccgagtatcaatagactgctcacgcggttgaaggagaaaacgttcgttacccgaccaactacttcgaaaaacctagtagcaccatgaaggttgcggagtgtttcgctcggcacttccccagtgtagatcaggtcgatgagtcaccgcattccccacgggcgaccgtggcggtggctgcgctggcggcctgcctatggggtaacccataggacgctctaatacggacatggtgcgaagagtctattgagctagttggtagtcctccggcccctgaatgcggctaatcctaactgcggagcgcgcgcccccattccaggaggtagcgcgtcgtaacgggcaactctgcagcggaaccgactactttgggtgtccgtgtttccttttatctttattctggctgcttatggtgacaattgacagattgttaccatatagctattggattggccatccggtcacaagcagagcgattatctaccaatttattggatttatcccactgcacactcgtgaatataacacattactgctgatactgagtttggacaaagcaaa

SEQ ID NO: 23223 - DNA, 592 bp, synthetic construct
  source 1..592: mol_type = other DNA
cagtcacgtcttgatcaagcacttctgtttccccggaccgagtatcaatagactgctcacgcggttgaaggagaaaacgttcgttacccgaccaactacttcgaaaaacctagtagcaccatgaaggttgcggagtgtttcgctcggcacttccccagtgtagatcaggtcgatgagtcaccgcattccccacgggcgaccgtggcggtggctgcgctggcggcctgcctatggggtaacccataggacgctctaatacggacatggtgcgaagagtctattgagctagttggtagtcctccggcccctgaatgcggctaatcctaactgcggagcgcgcgcccccattccaggaggtagcgcgtcgtaacgggcaactctgcagcggaaccgactactttgggtgtccgtgtttccttttatctttattctggctgcttatggtgacaattgacagattgttaccatatagctattggattggccatccggtcacaagcagagcgattatctaccaatttattggatttatcccactgcacactcgtgaatataacacattactgctgatactgagtttggacaaagcaaa

SEQ ID NO: 23224 - DNA, 542 bp, synthetic construct
  source 1..542: mol_type = other DNA
gactgctcacgcggttgaaggagaaaacgttcgttacccgaccaactacttcgaaaaacctagtagcaccatgaaggttgcggagtgtttcgctcggcacttccccagtgtagatcaggtcgatgagtcaccgcattccccacgggcgaccgtggcggtggctgcgctggcggcctgcctatggggtaacccataggacgctctaatacggacatggtgcgaagagtctattgagctagttggtagtcctccggcccctgaatgcggctaatcctaactgcggagcgcgcgcccccattccaggaggtagcgcgtcgtaacgggcaactctgcagcggaaccgactactttgggtgtccgtgtttccttttatctttattctggctgcttatggtgacaattgacagattgttaccatatagctattggattggccatccggtcacaagcagagcgattatctaccaatttattggatttatcccactgcacactcgtgaatataacacattactgctgatactgagtttggacaaagcaaa

SEQ ID NO: 23225 - DNA, 692 bp, synthetic construct
  source 1..692: mol_type = other DNA
cactctggtatcacgatacctttgtgcgcctgttttatatccccaccccgagtaaacgttagaagttacgcaaccccgatcaatagtaggtgtagcactccagctgcatcgagatcaagcacttctgtctccccggaccgagtatcaatagactgctaacgcggttgaaggagaaaacgttcgttacccggccaattacttcgagaagcccagtagtgccgtgaaagttgcggagtgtttcgctcagcacttcccccgtgtagatcaggctgatgagtcaccgcgatccccacaggtgactgtggcggtggctgcgttggcggcctgcctatggggcaacccataggacgctctaatacagacatggtgcgaagagcctattgagctaattggtagtcctccggcccctgaatgcggctaatcctaactgcggagcacatgccctcaaaccagggggtggtgtgtcgtaacgggtaactctgcagcggaaccgactactttgggtgtccgtgtttctttttattcttataatggctgcttatggtgacaattaaagaattgttaccatatagctattggattggccatccggtgactaacaaatcgctcatataccagtttgttggttttgttcccttatcacatacagctcataacaccctcttatatttactacaattgaatagcaagaa

SEQ ID NO: 23226 - DNA, 642 bp, synthetic construct
  source 1..642: mol_type = other DNA
agtaaacgttagaagttacgcaaccccgatcaatagtaggtgtagcactccagctgcatcgagatcaagcacttctgtctccccggaccgagtatcaatagactgctaacgcggttgaaggagaaaacgttcgttacccggccaattacttcgagaagcccagtagtgccgtgaaagttgcggagtgtttcgctcagcacttcccccgtgtagatcaggctgatgagtcaccgcgatccccacaggtgactgtggcggtggctgcgttggcggcctgcctatggggcaacccataggacgctctaatacagacatggtgcgaagagcctattgagctaattggtagtcctccggcccctgaatgcggctaatcctaactgcggagcacatgccctcaaaccagggggtggtgtgtcgtaacgggtaactctgcagcggaaccgactactttgggtgtccgtgtttctttttattcttataatggctgcttatggtgacaattaaagaattgttaccatatagctattggattggccatccggtgactaacaaatcgctcatataccagtttgttggttttgttcccttatcacatacagctcataacaccctcttatatttactacaattgaatagcaagaa

SEQ ID NO: 23227 - DNA, 592 bp, synthetic construct
  source 1..592: mol_type = other DNA
cagctgcatcgagatcaagcacttctgtctccccggaccgagtatcaatagactgctaacgcggttgaaggagaaaacgttcgttacccggccaattacttcgagaagcccagtagtgccgtgaaagttgcggagtgtttcgctcagcacttcccccgtgtagatcaggctgatgagtcaccgcgatccccacaggtgactgtggcggtggctgcgttggcggcctgcctatggggcaacccataggacgctctaatacagacatggtgcgaagagcctattgagctaattggtagtcctccggcccctgaatgcggctaatcctaactgcggagcacatgccctcaaaccagggggtggtgtgtcgtaacgggtaactctgcagcggaaccgactactttgggtgtccgtgtttctttttattcttataatggctgcttatggtgacaattaaagaattgttaccatatagctattggattggccatccggtgactaacaaatcgctcatataccagtttgttggttttgttcccttatcacatacagctcataacaccctcttatatttactacaattgaatagcaagaa

SEQ ID NO: 23228 - DNA, 542 bp, synthetic construct
  source 1..542: mol_type = other DNA
gactgctaacgcggttgaaggagaaaacgttcgttacccggccaattacttcgagaagcccagtagtgccgtgaaagttgcggagtgtttcgctcagcacttcccccgtgtagatcaggctgatgagtcaccgcgatccccacaggtgactgtggcggtggctgcgttggcggcctgcctatggggcaacccataggacgctctaatacagacatggtgcgaagagcctattgagctaattggtagtcctccggcccctgaatgcggctaatcctaactgcggagcacatgccctcaaaccagggggtggtgtgtcgtaacgggtaactctgcagcggaaccgactactttgggtgtccgtgtttctttttattcttataatggctgcttatggtgacaattaaagaattgttaccatatagctattggattggccatccggtgactaacaaatcgctcatataccagtttgttggttttgttcccttatcacatacagctcataacaccctcttatatttactacaattgaatagcaagaa

SEQ ID NO: 23229 - DNA, 692 bp, synthetic construct
  source 1..692: mol_type = other DNA
cacactggtattacggtacctttgtgcgcctgttttataccccccccaacctcgaaacttagaagtaaagcaaacccgatcaatagcaggtgcggcgcaccagtcgcatcttgatcaagcacttctgtaaccccggaccgagtatcaatagactgctcacgcggttgaaggagaaaacgttcgttacccggctaactacttcgagaaacccagtagcatcatgaaagttgcagagtgtttcgctcagcactacccccgtgtagatcaggccgatgagtcaccgcacttccccacgggcgaccgtggcggtggctgcgttggcggcctgcctatggggcaacccataggacgctctaatacggacatggtgcgaagagtctattgagctagttagtagtcctccggcccctgaatgcggctaatcctaactgcggagcacatacccttaatccaaagggcagtgtgtcgtaacgggtaactctgcagcggaaccgactactttgggtgtccgtgtttccttttaatttttactggctgcttatggtgacaattgaggaattgttgccatatagctattggattggccatccggtgactaacagagctattgtgttccaatttgttggatttaccccgctcacactcacagtcgtaagaacccttcattacgtgttatttctcaactcaagaaa

SEQ ID NO: 23230 - DNA, 642 bp, synthetic construct
  source 1..642: mol_type = other DNA
ctcgaaacttagaagtaaagcaaacccgatcaatagcaggtgcggcgcaccagtcgcatcttgatcaagcacttctgtaaccccggaccgagtatcaatagactgctcacgcggttgaaggagaaaacgttcgttacccggctaactacttcgagaaacccagtagcatcatgaaagttgcagagtgtttcgctcagcactacccccgtgtagatcaggccgatgagtcaccgcacttccccacgggcgaccgtggcggtggctgcgttggcggcctgcctatggggcaacccataggacgctctaatacggacatggtgcgaagagtctattgagctagttagtagtcctccggcccctgaatgcggctaatcctaactgcggagcacatacccttaatccaaagggcagtgtgtcgtaacgggtaactctgcagcggaaccgactactttgggtgtccgtgtttccttttaatttttactggctgcttatggtgacaattgaggaattgttgccatatagctattggattggccatccggtgactaacagagctattgtgttccaatttgttggatttaccccgctcacactcacagtcgtaagaacccttcattacgtgttatttctcaactcaagaaa

SEQ ID NO: 23231 - DNA, 592 bp, synthetic construct
  source 1..592: mol_type = other DNA
cagtcgcatcttgatcaagcacttctgtaaccccggaccgagtatcaatagactgctcacgcggttgaaggagaaaacgttcgttacccggctaactacttcgagaaacccagtagcatcatgaaagttgcagagtgtttcgctcagcactacccccgtgtagatcaggccgatgagtcaccgcacttccccacgggcgaccgtggcggtggctgcgttggcggcctgcctatggggcaacccataggacgctctaatacggacatggtgcgaagagtctattgagctagttagtagtcctccggcccctgaatgcggctaatcctaactgcggagcacatacccttaatccaaagggcagtgtgtcgtaacgggtaactctgcagcggaaccgactactttgggtgtccgtgtttccttttaatttttactggctgcttatggtgacaattgaggaattgttgccatatagctattggattggccatccggtgactaacagagctattgtgttccaatttgttggatttaccccgctcacactcacagtcgtaagaacccttcattacgtgttatttctcaactcaagaaa

SEQ ID NO: 23232 - DNA, 542 bp, synthetic construct
  source 1..542: mol_type = other DNA
gactgctcacgcggttgaaggagaaaacgttcgttacccggctaactacttcgagaaacccagtagcatcatgaaagttgcagagtgtttcgctcagcactacccccgtgtagatcaggccgatgagtcaccgcacttccccacgggcgaccgtggcggtggctgcgttggcggcctgcctatggggcaacccataggacgctctaatacggacatggtgcgaagagtctattgagctagttagtagtcctccggcccctgaatgcggctaatcctaactgcggagcacatacccttaatccaaagggcagtgtgtcgtaacgggtaactctgcagcggaaccgactactttgggtgtccgtgtttccttttaatttttactggctgcttatggtgacaattgaggaattgttgccatatagctattggattggccatccggtgactaacagagctattgtgttccaatttgttggatttaccccgctcacactcacagtcgtaagaacccttcattacgtgttatttctcaactcaagaaa

SEQ ID NO: 23233 - DNA, 692 bp, synthetic construct
  source 1..692: mol_type = other DNA
cacactggtatcccggtacctttgtgcgcctgttttatttacccttccccaatgtaatttagaagtttatcccaaatggtcaatagacaacccagcacgccagctgggcttcgaccaagcacttctgttaccccggaccgagtatcaataggctgctcacgcggctgaaagagaaaatgttcgttacccggccaaccacttcgagaaacttagtatcaccatgaaagttgcgcagtgtttcgctccgcacagccccagtgtagatcaggtcgatgagtcaccgcgttccccacgggcgaccgtggcggtggctgcgttggcggcctgcccatggggcaacccatgggacgcttcaatactgacatggtgcgaagagtctattgagctggttggtagtcctccggcccctgaatgcggctaatcctaactgcggagcagatacctacacaccagtgggcagtctgtcgtaacgggcaactctgcggcggaaccgactactttgggtgtccgtgtttccttttattcttatattggctgcttatggtgacaattgaaagattgttaccatatagctattggattggccatccagtgacaaacagagctatcgtgtacctatttgttggttttgtaccactgaaccgtaaggtgttagacactctaaacctcataattctgttcaattcagcaaa

SEQ ID NO: 23234 - DNA, 642 bp, synthetic construct
  source 1..642: mol_type = other DNA
aatgtaatttagaagtttatcccaaatggtcaatagacaacccagcacgccagctgggcttcgaccaagcacttctgttaccccggaccgagtatcaataggctgctcacgcggctgaaagagaaaatgttcgttacccggccaaccacttcgagaaacttagtatcaccatgaaagttgcgcagtgtttcgctccgcacagccccagtgtagatcaggtcgatgagtcaccgcgttccccacgggcgaccgtggcggtggctgcgttggcggcctgcccatggggcaacccatgggacgcttcaatactgacatggtgcgaagagtctattgagctggttggtagtcctccggcccctgaatgcggctaatcctaactgcggagcagatacctacacaccagtgggcagtctgtcgtaacgggcaactctgcggcggaaccgactactttgggtgtccgtgtttccttttattcttatattggctgcttatggtgacaattgaaagattgttaccatatagctattggattggccatccagtgacaaacagagctatcgtgtacctatttgttggttttgtaccactgaaccgtaaggtgttagacactctaaacctcataattctgttcaattcagcaaa

SEQ ID NO: 23235 - DNA, 592 bp, synthetic construct
  source 1..592: mol_type = other DNA
cagctgggcttcgaccaagcacttctgttaccccggaccgagtatcaataggctgctcacgcggctgaaagagaaaatgttcgttacccggccaaccacttcgagaaacttagtatcaccatgaaagttgcgcagtgtttcgctccgcacagccccagtgtagatcaggtcgatgagtcaccgcgttccccacgggcgaccgtggcggtggctgcgttggcggcctgcccatggggcaacccatgggacgcttcaatactgacatggtgcgaagagtctattgagctggttggtagtcctccggcccctgaatgcggctaatcctaactgcggagcagatacctacacaccagtgggcagtctgtcgtaacgggcaactctgcggcggaaccgactactttgggtgtccgtgtttccttttattcttatattggctgcttatggtgacaattgaaagattgttaccatatagctattggattggccatccagtgacaaacagagctatcgtgtacctatttgttggttttgtaccactgaaccgtaaggtgttagacactctaaacctcataattctgttcaattcagcaaa

SEQ ID NO: 23236 - DNA, 542 bp, synthetic construct
  source 1..542: mol_type = other DNA
ggctgctcacgcggctgaaagagaaaatgttcgttacccggccaaccacttcgagaaacttagtatcaccatgaaagttgcgcagtgtttcgctccgcacagccccagtgtagatcaggtcgatgagtcaccgcgttccccacgggcgaccgtggcggtggctgcgttggcggcctgcccatggggcaacccatgggacgcttcaatactgacatggtgcgaagagtctattgagctggttggtagtcctccggcccctgaatgcggctaatcctaactgcggagcagatacctacacaccagtgggcagtctgtcgtaacgggcaactctgcggcggaaccgactactttgggtgtccgtgtttccttttattcttatattggctgcttatggtgacaattgaaagattgttaccatatagctattggattggccatccagtgacaaacagagctatcgtgtacctatttgttggttttgtaccactgaaccgtaaggtgttagacactctaaacctcataattctgttcaattcagcaaa

SEQ ID NO: 23237 - DNA, 692 bp, synthetic construct
  source 1..692: mol_type = other DNA
cactctggtatcacggtacctttgtgcgcctgttttatacccccgtccccggttgtaacttagaagtaacactccacgaccgatagtaggtgtggcacgccagccatgtcttggtcaagcacttctgtttccccggattgagtatcaataggctgttcacacggccgaaggagaaaacatccgttatccggccaactacttcgagaaacctagtaccaccatgaaggttgcgcagtgtttcgctccgcacaaccccagtgtagatcaggccgatgagtcaccgctttccccacgggcgaccgtggcggtggctgcgttggcggcctgcccatggggaaatccatgggacgcttcaatactgacatggtgcgaagagtctattgagctagttggtattcctccggcccctgaatgcggctaatcctaactgcggagcagacacccacatgccagtgggcagtctgtcgtaacgggcaactctgcagcggaaccgactactttgggtgtccgtgtttccttttattcttatactggctgcttatggtgacaattgaaagattgttaccatatagctattggattggccatcctgtgactaacagagctattgtatacctatttgttggttttgtgccactgaattacaaggctttaaacaccctcaactttataatactactcaactcattaaa

SEQ ID NO: 23238 - DNA, 642 bp, synthetic construct
  source 1..642: mol_type = other DNA
ggttgtaacttagaagtaacactccacgaccgatagtaggtgtggcacgccagccatgtcttggtcaagcacttctgtttccccggattgagtatcaataggctgttcacacggccgaaggagaaaacatccgttatccggccaactacttcgagaaacctagtaccaccatgaaggttgcgcagtgtttcgctccgcacaaccccagtgtagatcaggccgatgagtcaccgctttccccacgggcgaccgtggcggtggctgcgttggcggcctgcccatggggaaatccatgggacgcttcaatactgacatggtgcgaagagtctattgagctagttggtattcctccggcccctgaatgcggctaatcctaactgcggagcagacacccacatgccagtgggcagtctgtcgtaacgggcaactctgcagcggaaccgactactttgggtgtccgtgtttccttttattcttatactggctgcttatggtgacaattgaaagattgttaccatatagctattggattggccatcctgtgactaacagagctattgtatacctatttgttggttttgtgccactgaattacaaggctttaaacaccctcaactttataatactactcaactcattaaa

SEQ ID NO: 23239 - DNA, 592 bp, synthetic construct
  source 1..592: mol_type = other DNA
cagccatgtcttggtcaagcacttctgtttccccggattgagtatcaataggctgttcacacggccgaaggagaaaacatccgttatccggccaactacttcgagaaacctagtaccaccatgaaggttgcgcagtgtttcgctccgcacaaccccagtgtagatcaggccgatgagtcaccgctttccccacgggcgaccgtggcggtggctgcgttggcggcctgcccatggggaaatccatgggacgcttcaatactgacatggtgcgaagagtctattgagctagttggtattcctccggcccctgaatgcggctaatcctaactgcggagcagacacccacatgccagtgggcagtctgtcgtaacgggcaactctgcagcggaaccgactactttgggtgtccgtgtttccttttattcttatactggctgcttatggtgacaattgaaagattgttaccatatagctattggattggccatcctgtgactaacagagctattgtatacctatttgttggttttgtgccactgaattacaaggctttaaacaccctcaactttataatactactcaactcattaaa

SEQ ID NO: 23240 - DNA, 542 bp, synthetic construct
  source 1..542: mol_type = other DNA
ggctgttcacacggccgaaggagaaaacatccgttatccggccaactacttcgagaaacctagtaccaccatgaaggttgcgcagtgtttcgctccgcacaaccccagtgtagatcaggccgatgagtcaccgctttccccacgggcgaccgtggcggtggctgcgttggcggcctgcccatggggaaatccatgggacgcttcaatactgacatggtgcgaagagtctattgagctagttggtattcctccggcccctgaatgcggctaatcctaactgcggagcagacacccacatgccagtgggcagtctgtcgtaacgggcaactctgcagcggaaccgactactttgggtgtccgtgtttccttttattcttatactggctgcttatggtgacaattgaaagattgttaccatatagctattggattggccatcctgtgactaacagagctattgtatacctatttgttggttttgtgccactgaattacaaggctttaaacaccctcaactttataatactactcaactcattaaa

SEQ ID NO: 23241 - DNA, 692 bp, synthetic construct
  source 1..692: mol_type = other DNA
cactctggtattccggtaccctagtgcgcctgttttatcctcccctccccgttgaaacttagaagcaagtcacatgcggtcaatagggggcctagtatgccaactaggtcacgaccaagcactcctgttaccccggactgagtatcaataagctgctcgcgcggctgaaggagaaaacgttcgttacccggctaattacttcgagaaacccagtaccaccgtgaaggttgcgcagcgtttcgctccgcacaaccccagtgtagatcaggtcgatgagtcaccgcaatccccacaggcgactgtggcggtggctgcgttggcggcctgcccatgggacaacccatgggacgcttcaatactgacatggtgcgaagagtctattgagctaattagtaatcctccggcccctgaatgcggctaatcctaactgcggagcagatacccacacaccagtgggcagtctgtcgtaacgggcaactctgcagcggaaccgactactttgggtgtccgtgtttccttttattcttatactggctgcttatggtgacaattgacagattgttaccatatagctattggattggccatccggtgacgaacagagcgattatttacctgtttgttggttttataccacttaattacaaggttctaaacactctcaacttcattctaacactcaactcaacaaa

SEQ ID NO: 23242 - DNA, 642 bp, synthetic construct
  source 1..642: mol_type = other DNA
gttgaaacttagaagcaagtcacatgcggtcaatagggggcctagtatgccaactaggtcacgaccaagcactcctgttaccccggactgagtatcaataagctgctcgcgcggctgaaggagaaaacgttcgttacccggctaattacttcgagaaacccagtaccaccgtgaaggttgcgcagcgtttcgctccgcacaaccccagtgtagatcaggtcgatgagtcaccgcaatccccacaggcgactgtggcggtggctgcgttggcggcctgcccatgggacaacccatgggacgcttcaatactgacatggtgcgaagagtctattgagctaattagtaatcctccggcccctgaatgcggctaatcctaactgcggagcagatacccacacaccagtgggcagtctgtcgtaacgggcaactctgcagcggaaccgactactttgggtgtccgtgtttccttttattcttatactggctgcttatggtgacaattgacagattgttaccatatagctattggattggccatccggtgacgaacagagcgattatttacctgtttgttggttttataccacttaattacaaggttctaaacactctcaacttcattctaacactcaactcaacaaa

SEQ ID NO: 23243 - DNA, 592 bp, synthetic construct
  source 1..592: mol_type = other DNA
caactaggtcacgaccaagcactcctgttaccccggactgagtatcaataagctgctcgcgcggctgaaggagaaaacgttcgttacccggctaattacttcgagaaacccagtaccaccgtgaaggttgcgcagcgtttcgctccgcacaaccccagtgtagatcaggtcgatgagtcaccgcaatccccacaggcgactgtggcggtggctgcgttggcggcctgcccatgggacaacccatgggacgcttcaatactgacatggtgcgaagagtctattgagctaattagtaatcctccggcccctgaatgcggctaatcctaactgcggagcagatacccacacaccagtgggcagtctgtcgtaacgggcaactctgcagcggaaccgactactttgggtgtccgtgtttccttttattcttatactggctgcttatggtgacaattgacagattgttaccatatagctattggattggccatccggtgacgaacagagcgattatttacctgtttgttggttttataccacttaattacaaggttctaaacactctcaacttcattctaacactcaactcaacaaa

SEQ ID NO: 23244 - DNA, 542 bp, synthetic construct
  source 1..542: mol_type = other DNA
agctgctcgcgcggctgaaggagaaaacgttcgttacccggctaattacttcgagaaacccagtaccaccgtgaaggttgcgcagcgtttcgctccgcacaaccccagtgtagatcaggtcgatgagtcaccgcaatccccacaggcgactgtggcggtggctgcgttggcggcctgcccatgggacaacccatgggacgcttcaatactgacatggtgcgaagagtctattgagctaattagtaatcctccggcccctgaatgcggctaatcctaactgcggagcagatacccacacaccagtgggcagtctgtcgtaacgggcaactctgcagcggaaccgactactttgggtgtccgtgtttccttttattcttatactggctgcttatggtgacaattgacagattgttaccatatagctattggattggccatccggtgacgaacagagcgattatttacctgtttgttggttttataccacttaattacaaggttctaaacactctcaacttcattctaacactcaactcaacaaa

SEQ ID NO: 23245 - DNA, 692 bp, synthetic construct
  source 1..692: mol_type = other DNA
gtactccggtatcacggtacccttgtacgcctgttttatactccctgccccgtaacttagaagcaaaccaaacaagttcaataggagggggtgcaagcccgcaccaccacgaacaagtactcctgtctccccggtgaggttgtatagactgtacccacggttgaaaacgactgatccgttatccgctctagtacttcgggaagcctagtagcattttggaatcttcgatgcgttgcgctcagcactcaaccccggagtgtagcttaggtcgatgagtctggacatcccccaccggtgacggtggtccaggctgcgttggcggcctacctgtggtccaaagccacaggacgctagttgtgaacaaggtgtgaagagcctactgagctactagagagtcctccggcccctgaatgcggctaatcctaaccacggagcaggtagttgcaacccagcaaccagtctgtcgtaatgcgcaagtctgtggcggaaccgactactttgggtgaccgtgtttccttttattttcatatatggctgcttatggtgacaatcattgattgttatcatatagcgacttggattggccatccggtgagaattagaactactgtttacccgtttgctgatttttgataacactccacacacttaccatttgagaattgtactgttggcaagacagcaccattata

SEQ ID NO: 23246 - DNA, 642 bp, synthetic construct
  source 1..642: mol_type = other DNA
cgtaacttagaagcaaaccaaacaagttcaataggagggggtgcaagcccgcaccaccacgaacaagtactcctgtctccccggtgaggttgtatagactgtacccacggttgaaaacgactgatccgttatccgctctagtacttcgggaagcctagtagcattttggaatcttcgatgcgttgcgctcagcactcaaccccggagtgtagcttaggtcgatgagtctggacatcccccaccggtgacggtggtccaggctgcgttggcggcctacctgtggtccaaagccacaggacgctagttgtgaacaaggtgtgaagagcctactgagctactagagagtcctccggcccctgaatgcggctaatcctaaccacggagcaggtagttgcaacccagcaaccagtctgtcgtaatgcgcaagtctgtggcggaaccgactactttgggtgaccgtgtttccttttattttcatatatggctgcttatggtgacaatcattgattgttatcatatagcgacttggattggccatccggtgagaattagaactactgtttacccgtttgctgatttttgataacactccacacacttaccatttgagaattgtactgttggcaagacagcaccattata

SEQ ID NO: 23247 - DNA, 592 bp, synthetic construct
  source 1..592: mol_type = other DNA
gcaccaccacgaacaagtactcctgtctccccggtgaggttgtatagactgtacccacggttgaaaacgactgatccgttatccgctctagtacttcgggaagcctagtagcattttggaatcttcgatgcgttgcgctcagcactcaaccccggagtgtagcttaggtcgatgagtctggacatcccccaccggtgacggtggtccaggctgcgttggcggcctacctgtggtccaaagccacaggacgctagttgtgaacaaggtgtgaagagcctactgagctactagagagtcctccggcccctgaatgcggctaatcctaaccacggagcaggtagttgcaacccagcaaccagtctgtcgtaatgcgcaagtctgtggcggaaccgactactttgggtgaccgtgtttccttttattttcatatatggctgcttatggtgacaatcattgattgttatcatatagcgacttggattggccatccggtgagaattagaactactgtttacccgtttgctgatttttgataacactccacacacttaccatttgagaattgtactgttggcaagacagcaccattata

SEQ ID NO: 23248 - DNA, 542 bp, synthetic construct
  source 1..542: mol_type = other DNA
gtacccacggttgaaaacgactgatccgttatccgctctagtacttcgggaagcctagtagcattttggaatcttcgatgcgttgcgctcagcactcaaccccggagtgtagcttaggtcgatgagtctggacatcccccaccggtgacggtggtccaggctgcgttggcggcctacctgtggtccaaagccacaggacgctagttgtgaacaaggtgtgaagagcctactgagctactagagagtcctccggcccctgaatgcggctaatcctaaccacggagcaggtagttgcaacccagcaaccagtctgtcgtaatgcgcaagtctgtggcggaaccgactactttgggtgaccgtgtttccttttattttcatatatggctgcttatggtgacaatcattgattgttatcatatagcgacttggattggccatccggtgagaattagaactactgtttacccgtttgctgatttttgataacactccacacacttaccatttgagaattgtactgttggcaagacagcaccattata

SEQ ID NO: 23249 - DNA, 692 bp, synthetic construct
  source 1..692: mol_type = other DNA
cacactggtatcacggtacccttgtgcgcctgttttatccacccctccccatcgtaacctagaagcatgactccaacggtcaatagacagctcagtaaaccaattgagccttgaccaagcacttctgttaccccggactgagtatcaataggctgctcacgcggccgaaggagaaaatgttcgttacccggccaattacttcgagaaacctagtaccaccatgaaggttgcgcggtgtttcgctcagcacaaccccagtgtagatcaggccgatgagtcaccgcattccccacgggtgaccgtggcggtggctgcgctggcggcctgcccatggggcaacccatgggacgcttcaatactgacatggtgtgaagagtctattgagctaattggtagtcctccggcccctgaatgcggctaatcctaactgcggagcagatacccacgcaccagtgggcagtctgtcgtaacgggcaactctgcagcggaaccgactactttgggtgtccgtgtttccttttattcttgtactggctgcttatggtgacaattgagagattgttaccatatagctattggattggccatccagtgtcaaacagagcgattgtctacttgttcattggttttataccattgagttacaaggttctagccactcttaacttcattttaacactcaatacatcaaa

SEQ ID NO: 23250 - DNA, 642 bp, synthetic construct
  source 1..642: mol_type = other DNA
atcgtaacctagaagcatgactccaacggtcaatagacagctcagtaaaccaattgagccttgaccaagcacttctgttaccccggactgagtatcaataggctgctcacgcggccgaaggagaaaatgttcgttacccggccaattacttcgagaaacctagtaccaccatgaaggttgcgcggtgtttcgctcagcacaaccccagtgtagatcaggccgatgagtcaccgcattccccacgggtgaccgtggcggtggctgcgctggcggcctgcccatggggcaacccatgggacgcttcaatactgacatggtgtgaagagtctattgagctaattggtagtcctccggcccctgaatgcggctaatcctaactgcggagcagatacccacgcaccagtgggcagtctgtcgtaacgggcaactctgcagcggaaccgactactttgggtgtccgtgtttccttttattcttgtactggctgcttatggtgacaattgagagattgttaccatatagctattggattggccatccagtgtcaaacagagcgattgtctacttgttcattggttttataccattgagttacaaggttctagccactcttaacttcattttaacactcaatacatcaaa

SEQ ID NO: 23251 - DNA, 592 bp, synthetic construct
  source 1..592: mol_type = other DNA
caattgagccttgaccaagcacttctgttaccccggactgagtatcaataggctgctcacgcggccgaaggagaaaatgttcgttacccggccaattacttcgagaaacctagtaccaccatgaaggttgcgcggtgtttcgctcagcacaaccccagtgtagatcaggccgatgagtcaccgcattccccacgggtgaccgtggcggtggctgcgctggcggcctgcccatggggcaacccatgggacgcttcaatactgacatggtgtgaagagtctattgagctaattggtagtcctccggcccctgaatgcggctaatcctaactgcggagcagatacccacgcaccagtgggcagtctgtcgtaacgggcaactctgcagcggaaccgactactttgggtgtccgtgtttccttttattcttgtactggctgcttatggtgacaattgagagattgttaccatatagctattggattggccatccagtgtcaaacagagcgattgtctacttgttcattggttttataccattgagttacaaggttctagccactcttaacttcattttaacactcaatacatcaaa

SEQ ID NO: 23252 - DNA, 542 bp, synthetic construct
  source 1..542: mol_type = other DNA
ggctgctcacgcggccgaaggagaaaatgttcgttacccggccaattacttcgagaaacctagtaccaccatgaaggttgcgcggtgtttcgctcagcacaaccccagtgtagatcaggccgatgagtcaccgcattccccacgggtgaccgtggcggtggctgcgctggcggcctgcccatggggcaacccatgggacgcttcaatactgacatggtgtgaagagtctattgagctaattggtagtcctccggcccctgaatgcggctaatcctaactgcggagcagatacccacgcaccagtgggcagtctgtcgtaacgggcaactctgcagcggaaccgactactttgggtgtccgtgtttccttttattcttgtactggctgcttatggtgacaattgagagattgttaccatatagctattggattggccatccagtgtcaaacagagcgattgtctacttgttcattggttttataccattgagttacaaggttctagccactcttaacttcattttaacactcaatacatcaaa

SEQ ID NO: 23253 - DNA, 692 bp, synthetic construct
  source 1..692: mol_type = other DNA
cacactggtattgcggtacctttgtgcgcctgttttatccacccttccccaatgaaacttagaagcttgactcaaacggtcaatagacagcccagtgcaccaactgggtctcgaccaggcactcctgtttccccggactgagtatcaataggctgcttgcgcggctgaaggagaaaacgttcgttacccggccaattacttcgagaaacctagtaccaccatggacgttgcgcagtgtttcgctccacacaaccccggtgtagatcaggtcgatgagtcaccgcaatccccacgggcgaccgtggcggtggctgcgctggcggcctgcccatggggcaacccatgggacgcttcaatactgacatggtgcgaagagtctattgagctaattggtagtcctccggcccctgaatgcggctaatcctaactgcggagcagatacccacataccagtgggcagtctgtcgtaacgggcaactctgcagcggaaccgactactttgggtgtccgtgtttccttttattcttatattggctgcttatggtgacaattgaaaggttgttaccatatagcttttggattggccatccagtgagcaacagagcgatcatactcctttttgttgggtttgtaccacttgattatagtagttacaacaccttgctatacgtcattcatttaaacacgagaaa

SEQ ID NO: 23254 - DNA, 642 bp, synthetic construct
  source 1..642: mol_type = other DNA
aatgaaacttagaagcttgactcaaacggtcaatagacagcccagtgcaccaactgggtctcgaccaggcactcctgtttccccggactgagtatcaataggctgcttgcgcggctgaaggagaaaacgttcgttacccggccaattacttcgagaaacctagtaccaccatggacgttgcgcagtgtttcgctccacacaaccccggtgtagatcaggtcgatgagtcaccgcaatccccacgggcgaccgtggcggtggctgcgctggcggcctgcccatggggcaacccatgggacgcttcaatactgacatggtgcgaagagtctattgagctaattggtagtcctccggcccctgaatgcggctaatcctaactgcggagcagatacccacataccagtgggcagtctgtcgtaacgggcaactctgcagcggaaccgactactttgggtgtccgtgtttccttttattcttatattggctgcttatggtgacaattgaaaggttgttaccatatagcttttggattggccatccagtgagcaacagagcgatcatactcctttttgttgggtttgtaccacttgattatagtagttacaacaccttgctatacgtcattcatttaaacacgagaaa

SEQ ID NO: 23255 - DNA, 592 bp, synthetic construct
  source 1..592: mol_type = other DNA
caactgggtctcgaccaggcactcctgtttccccggactgagtatcaataggctgcttgcgcggctgaaggagaaaacgttcgttacccggccaattacttcgagaaacctagtaccaccatggacgttgcgcagtgtttcgctccacacaaccccggtgtagatcaggtcgatgagtcaccgcaatccccacgggcgaccgtggcggtggctgcgctggcggcctgcccatggggcaacccatgggacgcttcaatactgacatggtgcgaagagtctattgagctaattggtagtcctccggcccctgaatgcggctaatcctaactgcggagcagatacccacataccagtgggcagtctgtcgtaacgggcaactctgcagcggaaccgactactttgggtgtccgtgtttccttttattcttatattggctgcttatggtgacaattgaaaggttgttaccatatagcttttggattggccatccagtgagcaacagagcgatcatactcctttttgttgggtttgtaccacttgattatagtagttacaacaccttgctatacgtcattcatttaaacacgagaaa

SEQ ID NO: 23256 - DNA, 542 bp, synthetic construct
  source 1..542: mol_type = other DNA
ggctgcttgcgcggctgaaggagaaaacgttcgttacccggccaattacttcgagaaacctagtaccaccatggacgttgcgcagtgtttcgctccacacaaccccggtgtagatcaggtcgatgagtcaccgcaatccccacgggcgaccgtggcggtggctgcgctggcggcctgcccatggggcaacccatgggacgcttcaatactgacatggtgcgaagagtctattgagctaattggtagtcctccggcccctgaatgcggctaatcctaactgcggagcagatacccacataccagtgggcagtctgtcgtaacgggcaactctgcagcggaaccgactactttgggtgtccgtgtttccttttattcttatattggctgcttatggtgacaattgaaaggttgttaccatatagcttttggattggccatccagtgagcaacagagcgatcatactcctttttgttgggtttgtaccacttgattatagtagttacaacaccttgctatacgtcattcatttaaacacgagaaa

SEQ ID NO: 23257 - DNA, 692 bp, synthetic construct
  source 1..692: mol_type = other DNA
cactctggtattacggtacctttgtgcgcctgttttatatccccctccccacttgaaacttagaagtgaaacacactgatcaatagttgacatggcaagccagccatgtcttgatcaagcacctctgtttccccggacctagtatcaatagactgctcgcgcggttgaaagagaaagcgttcgttacccggctaactacttcgagaaacttagtaacaccatggaagttgcggagtgtttcgctcagcacatccccagtgtagatcaggccgatgagtcaccgcattccccacgggcgaccgtggcggtggctgcgttggcggcctgcctgtggggcaacccacaggacgctctaatacaaacatggtgcgaagagtctattgagctagttagtagtcctccggcccctgaatgcggctaatcctaactgcggagcacgtgcttccaatccaggaggtggcgtgtcgtaacgggtaactctgcagcggaaccgactactttgggtgtccgtgtttccttttattcttgcattggctgcttatggtgacaattgagagattgttaccatatagctattggattggccatccggtgacaaacagagcaattatatatctctttgttggatacattccattgaactacaaggagttaaaaaccctcaattatattctgttcttgaattccgcaag

SEQ ID NO: 23258 - DNA, 642 bp, synthetic construct
  source 1..642: mol_type = other DNA
acttgaaacttagaagtgaaacacactgatcaatagttgacatggcaagccagccatgtcttgatcaagcacctctgtttccccggacctagtatcaatagactgctcgcgcggttgaaagagaaagcgttcgttacccggctaactacttcgagaaacttagtaacaccatggaagttgcggagtgtttcgctcagcacatccccagtgtagatcaggccgatgagtcaccgcattccccacgggcgaccgtggcggtggctgcgttggcggcctgcctgtggggcaacccacaggacgctctaatacaaacatggtgcgaagagtctattgagctagttagtagtcctccggcccctgaatgcggctaatcctaactgcggagcacgtgcttccaatccaggaggtggcgtgtcgtaacgggtaactctgcagcggaaccgactactttgggtgtccgtgtttccttttattcttgcattggctgcttatggtgacaattgagagattgttaccatatagctattggattggccatccggtgacaaacagagcaattatatatctctttgttggatacattccattgaactacaaggagttaaaaaccctcaattatattctgttcttgaattccgcaag

SEQ ID NO: 23259 - DNA, 592 bp, synthetic construct
  source 1..592: mol_type = other DNA
cagccatgtcttgatcaagcacctctgtttccccggacctagtatcaatagactgctcgcgcggttgaaagagaaagcgttcgttacccggctaactacttcgagaaacttagtaacaccatggaagttgcggagtgtttcgctcagcacatccccagtgtagatcaggccgatgagtcaccgcattccccacgggcgaccgtggcggtggctgcgttggcggcctgcctgtggggcaacccacaggacgctctaatacaaacatggtgcgaagagtctattgagctagttagtagtcctccggcccctgaatgcggctaatcctaactgcggagcacgtgcttccaatccaggaggtggcgtgtcgtaacgggtaactctgcagcggaaccgactactttgggtgtccgtgtttccttttattcttgcattggctgcttatggtgacaattgagagattgttaccatatagctattggattggccatccggtgacaaacagagcaattatatatctctttgttggatacattccattgaactacaaggagttaaaaaccctcaattatattctgttcttgaattccgcaag

SEQ ID NO: 23260 - DNA, 542 bp, synthetic construct
  source 1..542: mol_type = other DNA
gactgctcgcgcggttgaaagagaaagcgttcgttacccggctaactacttcgagaaacttagtaacaccatggaagttgcggagtgtttcgctcagcacatccccagtgtagatcaggccgatgagtcaccgcattccccacgggcgaccgtggcggtggctgcgttggcggcctgcctgtggggcaacccacaggacgctctaatacaaacatggtgcgaagagtctattgagctagttagtagtcctccggcccctgaatgcggctaatcctaactgcggagcacgtgcttccaatccaggaggtggcgtgtcgtaacgggtaactctgcagcggaaccgactactttgggtgtccgtgtttccttttattcttgcattggctgcttatggtgacaattgagagattgttaccatatagctattggattggccatccggtgacaaacagagcaattatatatctctttgttggatacattccattgaactacaaggagttaaaaaccctcaattatattctgttcttgaattccgcaag

SEQ ID NO: 23261 - DNA, 692 bp, synthetic construct
  source 1..692: mol_type = other DNA
cacactggtattacggtacctttgtgcgcctgttttacatcccctctcccattataacttagaagcacatacaaaacgaccaataggtggtccagcactccagctgggctctggtcaagtacttctgttaccccggactaagtatcaataagcggctaacgcggctgaaggagaaagcgtccgttacccggccaactacttcgggaaatctagtaacaccatgaaggttgcgcagtgtttcgctccgcacaaacccagtgtagatcaggtcgatgagtcaccgcattccccacaggcgactgtggcggtggctgcgttggcggcctgcccatggggcaacccatgggacgcttcaatactgacatggtgcgaagaatctactgagctagttggtagtcctccggcccctgaatgcggctaatcctaactgcggagcacatacccctaacccaaggggcagtgtgtcgtaacgggcaactctgcagcggaaccgactactttgggtgtccgtgtttccttttattcttatactggctgcttatggtgacaattgagaaattgttaccatatagcttttggattggccatccagtgactaacagagctattatttacttgtttgttggctttgtaccactcaaccttagagttttaaggactctcaatttggttctgctatcgaatacaacaaa

SEQ ID NO: 23262 - DNA, 642 bp, synthetic construct
  source 1..642: mol_type = other DNA
attataacttagaagcacatacaaaacgaccaataggtggtccagcactccagctgggctctggtcaagtacttctgttaccccggactaagtatcaataagcggctaacgcggctgaaggagaaagcgtccgttacccggccaactacttcgggaaatctagtaacaccatgaaggttgcgcagtgtttcgctccgcacaaacccagtgtagatcaggtcgatgagtcaccgcattccccacaggcgactgtggcggtggctgcgttggcggcctgcccatggggcaacccatgggacgcttcaatactgacatggtgcgaagaatctactgagctagttggtagtcctccggcccctgaatgcggctaatcctaactgcggagcacatacccctaacccaaggggcagtgtgtcgtaacgggcaactctgcagcggaaccgactactttgggtgtccgtgtttccttttattcttatactggctgcttatggtgacaattgagaaattgttaccatatagcttttggattggccatccagtgactaacagagctattatttacttgtttgttggctttgtaccactcaaccttagagttttaaggactctcaatttggttctgctatcgaatacaacaaa

SEQ ID NO: 23263 - DNA, 592 bp, synthetic construct
  source 1..592: mol_type = other DNA
cagctgggctctggtcaagtacttctgttaccccggactaagtatcaataagcggctaacgcggctgaaggagaaagcgtccgttacccggccaactacttcgggaaatctagtaacaccatgaaggttgcgcagtgtttcgctccgcacaaacccagtgtagatcaggtcgatgagtcaccgcattccccacaggcgactgtggcggtggctgcgttggcggcctgcccatggggcaacccatgggacgcttcaatactgacatggtgcgaagaatctactgagctagttggtagtcctccggcccctgaatgcggctaatcctaactgcggagcacatacccctaacccaaggggcagtgtgtcgtaacgggcaactctgcagcggaaccgactactttgggtgtccgtgtttccttttattcttatactggctgcttatggtgacaattgagaaattgttaccatatagcttttggattggccatccagtgactaacagagctattatttacttgtttgttggctttgtaccactcaaccttagagttttaaggactctcaatttggttctgctatcgaatacaacaaa

SEQ ID NO: 23264 - DNA, 542 bp, synthetic construct
  source 1..542: mol_type = other DNA
agcggctaacgcggctgaaggagaaagcgtccgttacccggccaactacttcgggaaatctagtaacaccatgaaggttgcgcagtgtttcgctccgcacaaacccagtgtagatcaggtcgatgagtcaccgcattccccacaggcgactgtggcggtggctgcgttggcggcctgcccatggggcaacccatgggacgcttcaatactgacatggtgcgaagaatctactgagctagttggtagtcctccggcccctgaatgcggctaatcctaactgcggagcacatacccctaacccaaggggcagtgtgtcgtaacgggcaactctgcagcggaaccgactactttgggtgtccgtgtttccttttattcttatactggctgcttatggtgacaattgagaaattgttaccatatagcttttggattggccatccagtgactaacagagctattatttacttgtttgttggctttgtaccactcaaccttagagttttaaggactctcaatttggttctgctatcgaatacaacaaa

SEQ ID NO: 23265 - DNA, 692 bp, synthetic construct
  source 1..692: mol_type = other DNA
cacactggtatcacggtacctttgtgcgcctgttttatatccccctccccactgtaacttagagaaatcacataaacgatcaatagaaggcgcagcacaccagctgagtcttgaccaagcacttctgtttccccggactgagtatcaatagactgctcacgcggttgaaggagaaaacgttcgttacccggccaactacttcgagaaacctagtaccaccatgaaagttgcgcagtgtttcgctcagcacaaccccagtgtagatcaggtcgatgagtcaccgcattccccacgggcgaccgtggcggtggctgcgttggcggcctgcctatggggcaacccatgggacgcttcaatactgacatggtgcgaagagtctattgagctagttggtagtcctccggcccctgaatgcggctaatcctaactgcggagcaagtgcccacaaaccagtgggtagcttgtcgtaacgggcaactctgcagcggaaccgactactttgggtgtccgtgtttccttttattcttattctggctgcttatggtgacaattgagagattgttaccatatagctattggattggccatccggtgactaacagagcaatcatattcctctttgttggatttataccacttgattccactagttacaacactctgctacacattatttacttaaaaccaagaag

SEQ ID NO: 23266 - DNA, 642 bp, synthetic construct
  source 1..642: mol_type = other DNA
actgtaacttagagaaatcacataaacgatcaatagaaggcgcagcacaccagctgagtcttgaccaagcacttctgtttccccggactgagtatcaatagactgctcacgcggttgaaggagaaaacgttcgttacccggccaactacttcgagaaacctagtaccaccatgaaagttgcgcagtgtttcgctcagcacaaccccagtgtagatcaggtcgatgagtcaccgcattccccacgggcgaccgtggcggtggctgcgttggcggcctgcctatggggcaacccatgggacgcttcaatactgacatggtgcgaagagtctattgagctagttggtagtcctccggcccctgaatgcggctaatcctaactgcggagcaagtgcccacaaaccagtgggtagcttgtcgtaacgggcaactctgcagcggaaccgactactttgggtgtccgtgtttccttttattcttattctggctgcttatggtgacaattgagagattgttaccatatagctattggattggccatccggtgactaacagagcaatcatattcctctttgttggatttataccacttgattccactagttacaacactctgctacacattatttacttaaaaccaagaag

SEQ ID NO: 23267 - DNA, 592 bp, synthetic construct
  source 1..592: mol_type = other DNA
cagctgagtcttgaccaagcacttctgtttccccggactgagtatcaatagactgctcacgcggttgaaggagaaaacgttcgttacccggccaactacttcgagaaacctagtaccaccatgaaagttgcgcagtgtttcgctcagcacaaccccagtgtagatcaggtcgatgagtcaccgcattccccacgggcgaccgtggcggtggctgcgttggcggcctgcctatggggcaacccatgggacgcttcaatactgacatggtgcgaagagtctattgagctagttggtagtcctccggcccctgaatgcggctaatcctaactgcggagcaagtgcccacaaaccagtgggtagcttgtcgtaacgggcaactctgcagcggaaccgactactttgggtgtccgtgtttccttttattcttattctggctgcttatggtgacaattgagagattgttaccatatagctattggattggccatccggtgactaacagagcaatcatattcctctttgttggatttataccacttgattccactagttacaacactctgctacacattatttacttaaaaccaagaag

SEQ ID NO: 23268 - DNA, 542 bp, synthetic construct
  source 1..542: mol_type = other DNA
gactgctcacgcggttgaaggagaaaacgttcgttacccggccaactacttcgagaaacctagtaccaccatgaaagttgcgcagtgtttcgctcagcacaaccccagtgtagatcaggtcgatgagtcaccgcattccccacgggcgaccgtggcggtggctgcgttggcggcctgcctatggggcaacccatgggacgcttcaatactgacatggtgcgaagagtctattgagctagttggtagtcctccggcccctgaatgcggctaatcctaactgcggagcaagtgcccacaaaccagtgggtagcttgtcgtaacgggcaactctgcagcggaaccgactactttgggtgtccgtgtttccttttattcttattctggctgcttatggtgacaattgagagattgttaccatatagctattggattggccatccggtgactaacagagcaatcatattcctctttgttggatttataccacttgattccactagttacaacactctgctacacattatttacttaaaaccaagaag

SEQ ID NO: 23269 - DNA, 692 bp, synthetic construct
  source 1..692: mol_type = other DNA
tacactggtattaaggtacccttgtacgcctgttttatatccctcccccgatttgtaacttagaattaaagcaaacccgatcaatagtaggtgtggcaaaccagccacatcttgatcaagcacttctgtttccccggaccgagtatcaatagactgctgacgcggttgaaggagaaaacgttcgttacccggccaactacttcgggaaacctagtaccaccatgaaggttgcgcagtgtttcgctccgcacaaccccagtgtagatcaggtcgatgagccaccgcattccccacaggcgactgtggcggtggctgcgttggcggcctgcccatggggtaacccatgggacgcttcaatactgacatggtgcgaagagtccactgagctagttggtattcctccggcccctgaatgcggctaatcctaactgcggagcaggcacccacgagccagtgggcagcctgtcgtaatgggtaactctgcagcggaaccgactactttgggtgtccgtgtttccattttctttttattggctgcttatggtgacaatcacggaattgttaccatatagctattggattggccatccagtgactaacagagcagtaatattcctttttgttggttttgtaccactcaccgtcacgagcctcagaacactcgtattcatcttaacccttaacaagataaa

SEQ ID NO: 23270 - DNA, 642 bp, synthetic construct
  source 1..642: mol_type = other DNA
atttgtaacttagaattaaagcaaacccgatcaatagtaggtgtggcaaaccagccacatcttgatcaagcacttctgtttccccggaccgagtatcaatagactgctgacgcggttgaaggagaaaacgttcgttacccggccaactacttcgggaaacctagtaccaccatgaaggttgcgcagtgtttcgctccgcacaaccccagtgtagatcaggtcgatgagccaccgcattccccacaggcgactgtggcggtggctgcgttggcggcctgcccatggggtaacccatgggacgcttcaatactgacatggtgcgaagagtccactgagctagttggtattcctccggcccctgaatgcggctaatcctaactgcggagcaggcacccacgagccagtgggcagcctgtcgtaatgggtaactctgcagcggaaccgactactttgggtgtccgtgtttccattttctttttattggctgcttatggtgacaatcacggaattgttaccatatagctattggattggccatccagtgactaacagagcagtaatattcctttttgttggttttgtaccactcaccgtcacgagcctcagaacactcgtattcatcttaacccttaacaagataaa

SEQ ID NO: 23271 - DNA, 592 bp, synthetic construct
  source 1..592: mol_type = other DNA
ccagccacatcttgatcaagcacttctgtttccccggaccgagtatcaatagactgctgacgcggttgaaggagaaaacgttcgttacccggccaactacttcgggaaacctagtaccaccatgaaggttgcgcagtgtttcgctccgcacaaccccagtgtagatcaggtcgatgagccaccgcattccccacaggcgactgtggcggtggctgcgttggcggcctgcccatggggtaacccatgggacgcttcaatactgacatggtgcgaagagtccactgagctagttggtattcctccggcccctgaatgcggctaatcctaactgcggagcaggcacccacgagccagtgggcagcctgtcgtaatgggtaactctgcagcggaaccgactactttgggtgtccgtgtttccattttctttttattggctgcttatggtgacaatcacggaattgttaccatatagctattggattggccatccagtgactaacagagcagtaatattcctttttgttggttttgtaccactcaccgtcacgagcctcagaacactcgtattcatcttaacccttaacaagataaa

SEQ ID NO: 23272 - DNA, 542 bp, synthetic construct
  source 1..542: mol_type = other DNA
agactgctgacgcggttgaaggagaaaacgttcgttacccggccaactacttcgggaaacctagtaccaccatgaaggttgcgcagtgtttcgctccgcacaaccccagtgtagatcaggtcgatgagccaccgcattccccacaggcgactgtggcggtggctgcgttggcggcctgcccatggggtaacccatgggacgcttcaatactgacatggtgcgaagagtccactgagctagttggtattcctccggcccctgaatgcggctaatcctaactgcggagcaggcacccacgagccagtgggcagcctgtcgtaatgggtaactctgcagcggaaccgactactttgggtgtccgtgtttccattttctttttattggctgcttatggtgacaatcacggaattgttaccatatagctattggattggccatccagtgactaacagagcagtaatattcctttttgttggttttgtaccactcaccgtcacgagcctcagaacactcgtattcatcttaacccttaacaagataaa

SEQ ID NO: 23273 - DNA, 692 bp, synthetic construct
  source 1..692: mol_type = other DNA
cactccggtattacggtacccttgtgcgcctgttttatttccccttccccaactgaaacttagaagaaatacacaatgatcgacagtaagcgtggcgcaccagccatgttttgatcaagcacttctgtttccccggaccaagtatcaatagactgctcacgcggttgaaggagaaagcgttcgttaaccggctaactacttcgagaaacccagtaacaccatgaaagttgcagagtgtttcgctcagcactcccccagtgtggatcaggtcgatgagtcactgcgttccccacgggtgaccgtggcagtggctgcgttggcggcctgcctgtggggcaacccacaggacgctctaatacggacatggtgtgaagagtctattgagctagttagtagtcctccggcccctgaatgcggctaatcctaactgtggagcacatgcccctaacccaaggggtggtgtgtcgtaatgggtaactccgcagcggaaccgactactttgggtgaccgtgtttccttttatttttacattggctgcatatggtgacgattgagagattgttgccatatagctattggattggccatccagtgtctaacagagctattgtatatctttttgttggatttgtaccacttgacttgaaagaggtcaggacactacaatacattatactgctgaatactgcaaa

SEQ ID NO: 23274 - DNA, 642 bp, synthetic construct
  source 1..642: mol_type = other DNA
aactgaaacttagaagaaatacacaatgatcgacagtaagcgtggcgcaccagccatgttttgatcaagcacttctgtttccccggaccaagtatcaatagactgctcacgcggttgaaggagaaagcgttcgttaaccggctaactacttcgagaaacccagtaacaccatgaaagttgcagagtgtttcgctcagcactcccccagtgtggatcaggtcgatgagtcactgcgttccccacgggtgaccgtggcagtggctgcgttggcggcctgcctgtggggcaacccacaggacgctctaatacggacatggtgtgaagagtctattgagctagttagtagtcctccggcccctgaatgcggctaatcctaactgtggagcacatgcccctaacccaaggggtggtgtgtcgtaatgggtaactccgcagcggaaccgactactttgggtgaccgtgtttccttttatttttacattggctgcatatggtgacgattgagagattgttgccatatagctattggattggccatccagtgtctaacagagctattgtatatctttttgttggatttgtaccacttgacttgaaagaggtcaggacactacaatacattatactgctgaatactgcaaa

SEQ ID NO: 23275 - DNA, 592 bp, synthetic construct
  source 1..592: mol_type = other DNA
cagccatgttttgatcaagcacttctgtttccccggaccaagtatcaatagactgctcacgcggttgaaggagaaagcgttcgttaaccggctaactacttcgagaaacccagtaacaccatgaaagttgcagagtgtttcgctcagcactcccccagtgtggatcaggtcgatgagtcactgcgttccccacgggtgaccgtggcagtggctgcgttggcggcctgcctgtggggcaacccacaggacgctctaatacggacatggtgtgaagagtctattgagctagttagtagtcctccggcccctgaatgcggctaatcctaactgtggagcacatgcccctaacccaaggggtggtgtgtcgtaatgggtaactccgcagcggaaccgactactttgggtgaccgtgtttccttttatttttacattggctgcatatggtgacgattgagagattgttgccatatagctattggattggccatccagtgtctaacagagctattgtatatctttttgttggatttgtaccacttgacttgaaagaggtcaggacactacaatacattatactgctgaatactgcaaa

SEQ ID NO: 23276 - DNA, 542 bp, synthetic construct
  source 1..542: mol_type = other DNA
gactgctcacgcggttgaaggagaaagcgttcgttaaccggctaactacttcgagaaacccagtaacaccatgaaagttgcagagtgtttcgctcagcactcccccagtgtggatcaggtcgatgagtcactgcgttccccacgggtgaccgtggcagtggctgcgttggcggcctgcctgtggggcaacccacaggacgctctaatacggacatggtgtgaagagtctattgagctagttagtagtcctccggcccctgaatgcggctaatcctaactgtggagcacatgcccctaacccaaggggtggtgtgtcgtaatgggtaactccgcagcggaaccgactactttgggtgaccgtgtttccttttatttttacattggctgcatatggtgacgattgagagattgttgccatatagctattggattggccatccagtgtctaacagagctattgtatatctttttgttggatttgtaccacttgacttgaaagaggtcaggacactacaatacattatactgctgaatactgcaaa

SEQ ID NO: 23277 - DNA, 692 bp, synthetic construct
  source 1..692: mol_type = other DNA
cactctggtatcacggtacctttgtgcgcctgttttattaccccttccccaattgaaaattagaagcaatgcacaccgatcaacagcaggcgtggcgcaccagtcacgtctcgatcaagcacttctgtttccccggaccgagtatcaatagactgctcacgcggttgaaggagaaagtgttcgttatccggctaaccacttcgagaaacccagtaacaccatgaaagttgcagggtgtttcgctcagcacttccccagtgtagatcaggtcgatgagtcaccgcgttccccacgggcgaccgtggcggtggctgcgttggcggcctgcctatgggttaacccataggacgctctaatacagacatggtgcgaagagtttattgagctggttagtatccctccggcccctgaatgcggctaatcctaactgcggagcacgtgcctccaatccagggggttgcatgtcgtaacgggtaactctgcagcggaaccgactactttgggtgtccgtgtttccttttattcttatactggctgcttatggtgacaatcgaggaattgttaccatatagctattggattggccatccggtgtctaacagagcgattatatacctctttgttggatttatgcagctcaataccaccaactttaacacattgaaatatatcttaaagttaaacacagcaaa

SEQ ID NO: 23278 - DNA, 642 bp, synthetic construct
  source 1..642: mol_type = other DNA
aattgaaaattagaagcaatgcacaccgatcaacagcaggcgtggcgcaccagtcacgtctcgatcaagcacttctgtttccccggaccgagtatcaatagactgctcacgcggttgaaggagaaagtgttcgttatccggctaaccacttcgagaaacccagtaacaccatgaaagttgcagggtgtttcgctcagcacttccccagtgtagatcaggtcgatgagtcaccgcgttccccacgggcgaccgtggcggtggctgcgttggcggcctgcctatgggttaacccataggacgctctaatacagacatggtgcgaagagtttattgagctggttagtatccctccggcccctgaatgcggctaatcctaactgcggagcacgtgcctccaatccagggggttgcatgtcgtaacgggtaactctgcagcggaaccgactactttgggtgtccgtgtttccttttattcttatactggctgcttatggtgacaatcgaggaattgttaccatatagctattggattggccatccggtgtctaacagagcgattatatacctctttgttggatttatgcagctcaataccaccaactttaacacattgaaatatatcttaaagttaaacacagcaaa

SEQ ID NO: 23279 - DNA, 592 bp, synthetic construct
  source 1..592: mol_type = other DNA
cagtcacgtctcgatcaagcacttctgtttccccggaccgagtatcaatagactgctcacgcggttgaaggagaaagtgttcgttatccggctaaccacttcgagaaacccagtaacaccatgaaagttgcagggtgtttcgctcagcacttccccagtgtagatcaggtcgatgagtcaccgcgttccccacgggcgaccgtggcggtggctgcgttggcggcctgcctatgggttaacccataggacgctctaatacagacatggtgcgaagagtttattgagctggttagtatccctccggcccctgaatgcggctaatcctaactgcggagcacgtgcctccaatccagggggttgcatgtcgtaacgggtaactctgcagcggaaccgactactttgggtgtccgtgtttccttttattcttatactggctgcttatggtgacaatcgaggaattgttaccatatagctattggattggccatccggtgtctaacagagcgattatatacctctttgttggatttatgcagctcaataccaccaactttaacacattgaaatatatcttaaagttaaacacagcaaa

SEQ ID NO: 23280 - DNA, 542 bp, synthetic construct
  source 1..542: mol_type = other DNA
gactgctcacgcggttgaaggagaaagtgttcgttatccggctaaccacttcgagaaacccagtaacaccatgaaagttgcagggtgtttcgctcagcacttccccagtgtagatcaggtcgatgagtcaccgcgttccccacgggcgaccgtggcggtggctgcgttggcggcctgcctatgggttaacccataggacgctctaatacagacatggtgcgaagagtttattgagctggttagtatccctccggcccctgaatgcggctaatcctaactgcggagcacgtgcctccaatccagggggttgcatgtcgtaacgggtaactctgcagcggaaccgactactttgggtgtccgtgtttccttttattcttatactggctgcttatggtgacaatcgaggaattgttaccatatagctattggattggccatccggtgtctaacagagcgattatatacctctttgttggatttatgcagctcaataccaccaactttaacacattgaaatatatcttaaagttaaacacagcaaa

SEQ ID NO: 23281 - DNA, 692 bp, synthetic construct
  source 1..692: mol_type = other DNA
cactctggtatcacggtacctttgtgcgcctgttttataccccctcccccaactgtaacttagaagtaacacacaccgatcaacagtcagcgtggcacaccagccacgttttgatcaagcacttctgttaccccggactgagtatcaatagactgctcacgcggttgaaggagaaagcgttcgttatccggccaactacttcgaaaaacctagtaacaccgtggaagttgcagagtgtttcgctcagcactaccccagtgtagatcaggtcgatgagtcaccgcattccccacgggcgaccgtggcggtggctgcgttggcggcctgcccatggggaaacccatgggacgctctaatacagacatggtgcgaagagtctattgagctagttggtagtcctccggcccctgaatgcggctaatcctaactgcggagcacacaccctcaagccagagggcagtgtgtcgtaacgggcaactctgcagcggaaccgactactttgggtgtccgtgtttcattttattcctatactggctgcttatggtgacaattgagagattgttaccatatagctattggattggccatccggtgaccaatagagctattatatatctctttgttgggtttataccacttagcttgaaagaggttaaaacattacaattcattgttaagttgaatacagcaaa

SEQ ID NO: 23282 - DNA, 642 bp, synthetic construct
  source 1..642: mol_type = other DNA
aactgtaacttagaagtaacacacaccgatcaacagtcagcgtggcacaccagccacgttttgatcaagcacttctgttaccccggactgagtatcaatagactgctcacgcggttgaaggagaaagcgttcgttatccggccaactacttcgaaaaacctagtaacaccgtggaagttgcagagtgtttcgctcagcactaccccagtgtagatcaggtcgatgagtcaccgcattccccacgggcgaccgtggcggtggctgcgttggcggcctgcccatggggaaacccatgggacgctctaatacagacatggtgcgaagagtctattgagctagttggtagtcctccggcccctgaatgcggctaatcctaactgcggagcacacaccctcaagccagagggcagtgtgtcgtaacgggcaactctgcagcggaaccgactactttgggtgtccgtgtttcattttattcctatactggctgcttatggtgacaattgagagattgttaccatatagctattggattggccatccggtgaccaatagagctattatatatctctttgttgggtttataccacttagcttgaaagaggttaaaacattacaattcattgttaagttgaatacagcaaa

SEQ ID NO: 23283 - DNA, 592 bp, synthetic construct
  source 1..592: mol_type = other DNA
cagccacgttttgatcaagcacttctgttaccccggactgagtatcaatagactgctcacgcggttgaaggagaaagcgttcgttatccggccaactacttcgaaaaacctagtaacaccgtggaagttgcagagtgtttcgctcagcactaccccagtgtagatcaggtcgatgagtcaccgcattccccacgggcgaccgtggcggtggctgcgttggcggcctgcccatggggaaacccatgggacgctctaatacagacatggtgcgaagagtctattgagctagttggtagtcctccggcccctgaatgcggctaatcctaactgcggagcacacaccctcaagccagagggcagtgtgtcgtaacgggcaactctgcagcggaaccgactactttgggtgtccgtgtttcattttattcctatactggctgcttatggtgacaattgagagattgttaccatatagctattggattggccatccggtgaccaatagagctattatatatctctttgttgggtttataccacttagcttgaaagaggttaaaacattacaattcattgttaagttgaatacagcaaa

SEQ ID NO: 23284 - DNA, 542 bp, synthetic construct
  source 1..542: mol_type = other DNA
gactgctcacgcggttgaaggagaaagcgttcgttatccggccaactacttcgaaaaacctagtaacaccgtggaagttgcagagtgtttcgctcagcactaccccagtgtagatcaggtcgatgagtcaccgcattccccacgggcgaccgtggcggtggctgcgttggcggcctgcccatggggaaacccatgggacgctctaatacagacatggtgcgaagagtctattgagctagttggtagtcctccggcccctgaatgcggctaatcctaactgcggagcacacaccctcaagccagagggcagtgtgtcgtaacgggcaactctgcagcggaaccgactactttgggtgtccgtgtttcattttattcctatactggctgcttatggtgacaattgagagattgttaccatatagctattggattggccatccggtgaccaatagagctattatatatctctttgttgggtttataccacttagcttgaaagaggttaaaacattacaattcattgttaagttgaatacagcaaa

SEQ ID NO: 23285 - DNA, 692 bp, synthetic construct
  source 1..692: mol_type = other DNA
cacactggtatcacggtacccttgtgcgcctgttttataaacccttccccaatgcaacttagaagctcaactttaccggtcaatagacagtccagtacgccaactgggcttcgatcaagcacttctgttaccccggactaagtatcaataggctgctcacgcggctgaaggagaaaacgttcgttacccggccaattacttcgagaaacccagtaacactatggaggttgcgcagtgtttcgttccacacaaccccagtgtagatcaggtcgatgagtcaccgctttccccacgggcgaccgtggcggtggctgcgttggcggcctgcccatggggcaacccatgggacgcttcaatactgacatggtgtgaagagtctattgagctaattggtattcctccggcccctgaatgcggctaatcctaactgcggagcagatactcacgagccagtgggcagtctgtcgtaacgggtaactctgcagcggaaccgactactttgggtgtccgtgtttccttttattcatatattggctgcttatggtgacaattgagagattgttaccatatagctattggattggccatccggtgactaatagagcaattgtttacctatttgttggctttgtgccgttgaactacaaggttttaaaaactattaactacatcctagtacttaacacgttgaa

SEQ ID NO: 23286 - DNA, 642 bp, synthetic construct
  source 1..642: mol_type = other DNA
aatgcaacttagaagctcaactttaccggtcaatagacagtccagtacgccaactgggcttcgatcaagcacttctgttaccccggactaagtatcaataggctgctcacgcggctgaaggagaaaacgttcgttacccggccaattacttcgagaaacccagtaacactatggaggttgcgcagtgtttcgttccacacaaccccagtgtagatcaggtcgatgagtcaccgctttccccacgggcgaccgtggcggtggctgcgttggcggcctgcccatggggcaacccatgggacgcttcaatactgacatggtgtgaagagtctattgagctaattggtattcctccggcccctgaatgcggctaatcctaactgcggagcagatactcacgagccagtgggcagtctgtcgtaacgggtaactctgcagcggaaccgactactttgggtgtccgtgtttccttttattcatatattggctgcttatggtgacaattgagagattgttaccatatagctattggattggccatccggtgactaatagagcaattgtttacctatttgttggctttgtgccgttgaactacaaggttttaaaaactattaactacatcctagtacttaacacgttgaa

SEQ ID NO: 23287 - DNA, 592 bp, synthetic construct
  source 1..592: mol_type = other DNA
caactgggcttcgatcaagcacttctgttaccccggactaagtatcaataggctgctcacgcggctgaaggagaaaacgttcgttacccggccaattacttcgagaaacccagtaacactatggaggttgcgcagtgtttcgttccacacaaccccagtgtagatcaggtcgatgagtcaccgctttccccacgggcgaccgtggcggtggctgcgttggcggcctgcccatggggcaacccatgggacgcttcaatactgacatggtgtgaagagtctattgagctaattggtattcctccggcccctgaatgcggctaatcctaactgcggagcagatactcacgagccagtgggcagtctgtcgtaacgggtaactctgcagcggaaccgactactttgggtgtccgtgtttccttttattcatatattggctgcttatggtgacaattgagagattgttaccatatagctattggattggccatccggtgactaatagagcaattgtttacctatttgttggctttgtgccgttgaactacaaggttttaaaaactattaactacatcctagtacttaacacgttgaa

SEQ ID NO: 23288 - DNA, 542 bp, synthetic construct
  source 1..542: mol_type = other DNA
ggctgctcacgcggctgaaggagaaaacgttcgttacccggccaattacttcgagaaacccagtaacactatggaggttgcgcagtgtttcgttccacacaaccccagtgtagatcaggtcgatgagtcaccgctttccccacgggcgaccgtggcggtggctgcgttggcggcctgcccatggggcaacccatgggacgcttcaatactgacatggtgtgaagagtctattgagctaattggtattcctccggcccctgaatgcggctaatcctaactgcggagcagatactcacgagccagtgggcagtctgtcgtaacgggtaactctgcagcggaaccgactactttgggtgtccgtgtttccttttattcatatattggctgcttatggtgacaattgagagattgttaccatatagctattggattggccatccggtgactaatagagcaattgtttacctatttgttggctttgtgccgttgaactacaaggttttaaaaactattaactacatcctagtacttaacacgttgaa

SEQ ID NO: 23289 - DNA, 692 bp, synthetic construct
  source 1..692: mol_type = other DNA
caccctggtatcacggtacctttgtgcgcctgttttatatcccttcccccaattgtaacttagaagaaacacacaccgatcaacagcaagcgtggcacaccagccatgttttggtcaagcacttctgttaccccggactgagtatcaatagactgctcacgcggttgaaggagaaagcgtccgttatccggccagctacttcgagaaacctagtaacaccatggaagttgcggagtgtttcgctcagcactaccccagtgtagatcaggtcgatgagtcaccgctttccccacgggcgaccgtggcggtggctgcgttggcggcctgcctatgggggaacccataggacgctctaatacagacatggtgcgaagagtctattgagctagctggtattcctccggcccctgaatgcggctaatcctaactgtggagcacatgcccctaatccaaggggtagtgtgtcgtaatgagcaattccgcagcggaaccgactactttgggtgtccgtgtttcctcttattcttgtactggctgcttatggtgacaattgagagattgttaccatatagctattggattggccatccggtgactaatagagctattgtgtatctctttgttggatttgtaccacttaatttgaaagaaatcaggacactacgctacattttactattgaacaccgcaaa

SEQ ID NO: 23290 - DNA, 642 bp, synthetic construct
  source 1..642: mol_type = other DNA
aattgtaacttagaagaaacacacaccgatcaacagcaagcgtggcacaccagccatgttttggtcaagcacttctgttaccccggactgagtatcaatagactgctcacgcggttgaaggagaaagcgtccgttatccggccagctacttcgagaaacctagtaacaccatggaagttgcggagtgtttcgctcagcactaccccagtgtagatcaggtcgatgagtcaccgctttccccacgggcgaccgtggcggtggctgcgttggcggcctgcctatgggggaacccataggacgctctaatacagacatggtgcgaagagtctattgagctagctggtattcctccggcccctgaatgcggctaatcctaactgtggagcacatgcccctaatccaaggggtagtgtgtcgtaatgagcaattccgcagcggaaccgactactttgggtgtccgtgtttcctcttattcttgtactggctgcttatggtgacaattgagagattgttaccatatagctattggattggccatccggtgactaatagagctattgtgtatctctttgttggatttgtaccacttaatttgaaagaaatcaggacactacgctacattttactattgaacaccgcaaa

SEQ ID NO: 23291 - DNA, 592 bp, synthetic construct
  source 1..592: mol_type = other DNA
cagccatgttttggtcaagcacttctgttaccccggactgagtatcaatagactgctcacgcggttgaaggagaaagcgtccgttatccggccagctacttcgagaaacctagtaacaccatggaagttgcggagtgtttcgctcagcactaccccagtgtagatcaggtcgatgagtcaccgctttccccacgggcgaccgtggcggtggctgcgttggcggcctgcctatgggggaacccataggacgctctaatacagacatggtgcgaagagtctattgagctagctggtattcctccggcccctgaatgcggctaatcctaactgtggagcacatgcccctaatccaaggggtagtgtgtcgtaatgagcaattccgcagcggaaccgactactttgggtgtccgtgtttcctcttattcttgtactggctgcttatggtgacaattgagagattgttaccatatagctattggattggccatccggtgactaatagagctattgtgtatctctttgttggatttgtaccacttaatttgaaagaaatcaggacactacgctacattttactattgaacaccgcaaa

SEQ ID NO: 23292 - DNA, 542 bp, synthetic construct
  source 1..542: mol_type = other DNA
gactgctcacgcggttgaaggagaaagcgtccgttatccggccagctacttcgagaaacctagtaacaccatggaagttgcggagtgtttcgctcagcactaccccagtgtagatcaggtcgatgagtcaccgctttccccacgggcgaccgtggcggtggctgcgttggcggcctgcctatgggggaacccataggacgctctaatacagacatggtgcgaagagtctattgagctagctggtattcctccggcccctgaatgcggctaatcctaactgtggagcacatgcccctaatccaaggggtagtgtgtcgtaatgagcaattccgcagcggaaccgactactttgggtgtccgtgtttcctcttattcttgtactggctgcttatggtgacaattgagagattgttaccatatagctattggattggccatccggtgactaatagagctattgtgtatctctttgttggatttgtaccacttaatttgaaagaaatcaggacactacgctacattttactattgaacaccgcaaa

SEQ ID NO: 23293 - DNA, 692 bp, synthetic construct
  source 1..692: mol_type = other DNA
cacactggtatcacggtacctttgtgcgcctgttttataaccccttccccaaacgtaacgtagaagccacacacactgatcaacagtgggcacagcgcaccagccgtgtctcgatcaagcacttctgttttcccggactgagtatcaatagactgctcacgcggttgaaggagaaaacgttcgttacccggctgactacttcgagaagcttagtaacgctatgaaagttgcgaagtgtttcgttcagcactccccccgtgtagatcaggtcgatgagtcaccgcattccccacgggtgaccgtggcggtggctgcgctggcggcctgcccatggggtgacccatgggacgcttcaatacagacatggtgcgaagagcctattgagctagtcagtagtcctccggcccctgaatgcggctaatcctaactgcggagcatgtgccctcaatccagagggtagcgtgtcgtaacgggcaactctgcagcggaaccgactactttgggtgtccgtgtttctttttattcttatattggctgcttatggtgacaattgagagattgttgccatatagctattggattggccatccggtgagtaacagagctattatttactccatcgtaggcttcgtgccattgaactacaaggtcttgaaaactctcaactttgttataatacttaataccacaaa

SEQ ID NO: 23294 - DNA, 642 bp, synthetic construct
  source 1..642: mol_type = other DNA
aaacgtaacgtagaagccacacacactgatcaacagtgggcacagcgcaccagccgtgtctcgatcaagcacttctgttttcccggactgagtatcaatagactgctcacgcggttgaaggagaaaacgttcgttacccggctgactacttcgagaagcttagtaacgctatgaaagttgcgaagtgtttcgttcagcactccccccgtgtagatcaggtcgatgagtcaccgcattccccacgggtgaccgtggcggtggctgcgctggcggcctgcccatggggtgacccatgggacgcttcaatacagacatggtgcgaagagcctattgagctagtcagtagtcctccggcccctgaatgcggctaatcctaactgcggagcatgtgccctcaatccagagggtagcgtgtcgtaacgggcaactctgcagcggaaccgactactttgggtgtccgtgtttctttttattcttatattggctgcttatggtgacaattgagagattgttgccatatagctattggattggccatccggtgagtaacagagctattatttactccatcgtaggcttcgtgccattgaactacaaggtcttgaaaactctcaactttgttataatacttaataccacaaa

SEQ ID NO: 23295 - DNA, 592 bp, synthetic construct
  source 1..592: mol_type = other DNA
cagccgtgtctcgatcaagcacttctgttttcccggactgagtatcaatagactgctcacgcggttgaaggagaaaacgttcgttacccggctgactacttcgagaagcttagtaacgctatgaaagttgcgaagtgtttcgttcagcactccccccgtgtagatcaggtcgatgagtcaccgcattccccacgggtgaccgtggcggtggctgcgctggcggcctgcccatggggtgacccatgggacgcttcaatacagacatggtgcgaagagcctattgagctagtcagtagtcctccggcccctgaatgcggctaatcctaactgcggagcatgtgccctcaatccagagggtagcgtgtcgtaacgggcaactctgcagcggaaccgactactttgggtgtccgtgtttctttttattcttatattggctgcttatggtgacaattgagagattgttgccatatagctattggattggccatccggtgagtaacagagctattatttactccatcgtaggcttcgtgccattgaactacaaggtcttgaaaactctcaactttgttataatacttaataccacaaa

SEQ ID NO: 23296 - DNA, 542 bp, synthetic construct
  source 1..542: mol_type = other DNA
gactgctcacgcggttgaaggagaaaacgttcgttacccggctgactacttcgagaagcttagtaacgctatgaaagttgcgaagtgtttcgttcagcactccccccgtgtagatcaggtcgatgagtcaccgcattccccacgggtgaccgtggcggtggctgcgctggcggcctgcccatggggtgacccatgggacgcttcaatacagacatggtgcgaagagcctattgagctagtcagtagtcctccggcccctgaatgcggctaatcctaactgcggagcatgtgccctcaatccagagggtagcgtgtcgtaacgggcaactctgcagcggaaccgactactttgggtgtccgtgtttctttttattcttatattggctgcttatggtgacaattgagagattgttgccatatagctattggattggccatccggtgagtaacagagctattatttactccatcgtaggcttcgtgccattgaactacaaggtcttgaaaactctcaactttgttataatacttaataccacaaa

SEQ ID NO: 23297 - DNA, 692 bp, synthetic construct
  source 1..692: mol_type = other DNA
cacactggtatcacggtacccttgtgcgcctgttttatcttcccctccccactgtaacttagaagaatgacataaacggtcaacagatagctcagtacaccaactgagccccgaccaagcacttctgttaccccggaccgagtaacaataggctgctcgcgcggctgaaggtgaaaacgttcgttacccggccaattacttcgagaaacctagtaccaccatgaaggttgcgcagcgtttcgctccgcacaaccccagtgtagatcaggtcgatgagtcaccgcactccccacgggcgaccgtggcggtggctgcgctggcggcctgcctatggggcaacccatgggacgcttcaatactgacatggtgcgaagagtctattgagctaattggtagtcctccggcccctgaatgcggctaatcctaactgcggggcaagtgcccacaaaccagtgggtggcttgtcgtaacgggtaaccctgcagcggaaccgactactttgggtgtccgtgtttccttttattcttattctggctgcttatggtgacaattgagagattgttgccatatagctattggattggccatctggtgagtaacagagcaatcatattcctctttgttggatttataccacttgattccactagttacaacactctgctacatattatttgcttaaatacaagaag

SEQ ID NO: 23298 - DNA, 642 bp, synthetic construct
  source 1..642: mol_type = other DNA
actgtaacttagaagaatgacataaacggtcaacagatagctcagtacaccaactgagccccgaccaagcacttctgttaccccggaccgagtaacaataggctgctcgcgcggctgaaggtgaaaacgttcgttacccggccaattacttcgagaaacctagtaccaccatgaaggttgcgcagcgtttcgctccgcacaaccccagtgtagatcaggtcgatgagtcaccgcactccccacgggcgaccgtggcggtggctgcgctggcggcctgcctatggggcaacccatgggacgcttcaatactgacatggtgcgaagagtctattgagctaattggtagtcctccggcccctgaatgcggctaatcctaactgcggggcaagtgcccacaaaccagtgggtggcttgtcgtaacgggtaaccctgcagcggaaccgactactttgggtgtccgtgtttccttttattcttattctggctgcttatggtgacaattgagagattgttgccatatagctattggattggccatctggtgagtaacagagcaatcatattcctctttgttggatttataccacttgattccactagttacaacactctgctacatattatttgcttaaatacaagaag

SEQ ID NO: 23299 - DNA, 592 bp, synthetic construct
  source 1..592: mol_type = other DNA
caactgagccccgaccaagcacttctgttaccccggaccgagtaacaataggctgctcgcgcggctgaaggtgaaaacgttcgttacccggccaattacttcgagaaacctagtaccaccatgaaggttgcgcagcgtttcgctccgcacaaccccagtgtagatcaggtcgatgagtcaccgcactccccacgggcgaccgtggcggtggctgcgctggcggcctgcctatggggcaacccatgggacgcttcaatactgacatggtgcgaagagtctattgagctaattggtagtcctccggcccctgaatgcggctaatcctaactgcggggcaagtgcccacaaaccagtgggtggcttgtcgtaacgggtaaccctgcagcggaaccgactactttgggtgtccgtgtttccttttattcttattctggctgcttatggtgacaattgagagattgttgccatatagctattggattggccatctggtgagtaacagagcaatcatattcctctttgttggatttataccacttgattccactagttacaacactctgctacatattatttgcttaaatacaagaag

SEQ ID NO: 23300 - DNA, 542 bp, synthetic construct
  source 1..542: mol_type = other DNA
ggctgctcgcgcggctgaaggtgaaaacgttcgttacccggccaattacttcgagaaacctagtaccaccatgaaggttgcgcagcgtttcgctccgcacaaccccagtgtagatcaggtcgatgagtcaccgcactccccacgggcgaccgtggcggtggctgcgctggcggcctgcctatggggcaacccatgggacgcttcaatactgacatggtgcgaagagtctattgagctaattggtagtcctccggcccctgaatgcggctaatcctaactgcggggcaagtgcccacaaaccagtgggtggcttgtcgtaacgggtaaccctgcagcggaaccgactactttgggtgtccgtgtttccttttattcttattctggctgcttatggtgacaattgagagattgttgccatatagctattggattggccatctggtgagtaacagagcaatcatattcctctttgttggatttataccacttgattccactagttacaacactctgctacatattatttgcttaaatacaagaag

SEQ ID NO: 23301 - DNA, 692 bp, synthetic construct
  source 1..692: mol_type = other DNA
actctggtattgcggtacctttgtgcgcctgttttatatccccctcccccatttgaaacttagaagcaagacacaccgatcaatagctgatatggcaagccagccatatcttgatcaagtacttctgtttccccggaccgagtatcaatagactgcttgcgcggtcgaaggagaaagcgttcgttacccggctaattacttcgagaaacctagtaacaccatgaaagttgcagagtgtttcgctcagcacaaccccagtgtagatcaggctgatgagtcaccgcattccccacgggtgaccgtggcggtggctgcgttggcggcctgcctgtggggcaacccacaggacgctctaatacagacatggtgtgaagagtctattgagctaattagtagtcctccggcccctgaatgcggctaatcctaactgcggagcacgtacccccattccaggaggtggcgtgtcgtaacgggtaactctgcagcggaaccgactactttgggtgtccgtgtttccttttatctttacactggctgcttatggtgacaattgaaagattgttaccatatagctattggattggccatccggtgacaaatagagcgattgtatatttgttcattggatttgtaccactaagctataaagcattaaacactcttaaccttatcctagtgcttaactcaacaaa

SEQ ID NO: 23302 - DNA, 642 bp, synthetic construct
  source 1..642: mol_type = other DNA
atttgaaacttagaagcaagacacaccgatcaatagctgatatggcaagccagccatatcttgatcaagtacttctgtttccccggaccgagtatcaatagactgcttgcgcggtcgaaggagaaagcgttcgttacccggctaattacttcgagaaacctagtaacaccatgaaagttgcagagtgtttcgctcagcacaaccccagtgtagatcaggctgatgagtcaccgcattccccacgggtgaccgtggcggtggctgcgttggcggcctgcctgtggggcaacccacaggacgctctaatacagacatggtgtgaagagtctattgagctaattagtagtcctccggcccctgaatgcggctaatcctaactgcggagcacgtacccccattccaggaggtggcgtgtcgtaacgggtaactctgcagcggaaccgactactttgggtgtccgtgtttccttttatctttacactggctgcttatggtgacaattgaaagattgttaccatatagctattggattggccatccggtgacaaatagagcgattgtatatttgttcattggatttgtaccactaagctataaagcattaaacactcttaaccttatcctagtgcttaactcaacaaa

SEQ ID NO: 23303 - DNA, 592 bp, synthetic construct
  source 1..592: mol_type = other DNA
cagccatatcttgatcaagtacttctgtttccccggaccgagtatcaatagactgcttgcgcggtcgaaggagaaagcgttcgttacccggctaattacttcgagaaacctagtaacaccatgaaagttgcagagtgtttcgctcagcacaaccccagtgtagatcaggctgatgagtcaccgcattccccacgggtgaccgtggcggtggctgcgttggcggcctgcctgtggggcaacccacaggacgctctaatacagacatggtgtgaagagtctattgagctaattagtagtcctccggcccctgaatgcggctaatcctaactgcggagcacgtacccccattccaggaggtggcgtgtcgtaacgggtaactctgcagcggaaccgactactttgggtgtccgtgtttccttttatctttacactggctgcttatggtgacaattgaaagattgttaccatatagctattggattggccatccggtgacaaatagagcgattgtatatttgttcattggatttgtaccactaagctataaagcattaaacactcttaaccttatcctagtgcttaactcaacaaa

SEQ ID NO: 23304 - DNA, 542 bp, synthetic construct
  source 1..542: mol_type = other DNA
gactgcttgcgcggtcgaaggagaaagcgttcgttacccggctaattacttcgagaaacctagtaacaccatgaaagttgcagagtgtttcgctcagcacaaccccagtgtagatcaggctgatgagtcaccgcattccccacgggtgaccgtggcggtggctgcgttggcggcctgcctgtggggcaacccacaggacgctctaatacagacatggtgtgaagagtctattgagctaattagtagtcctccggcccctgaatgcggctaatcctaactgcggagcacgtacccccattccaggaggtggcgtgtcgtaacgggtaactctgcagcggaaccgactactttgggtgtccgtgtttccttttatctttacactggctgcttatggtgacaattgaaagattgttaccatatagctattggattggccatccggtgacaaatagagcgattgtatatttgttcattggatttgtaccactaagctataaagcattaaacactcttaaccttatcctagtgcttaactcaacaaa

SEQ ID NO: 23305 - DNA, 692 bp, synthetic construct
  source 1..692: mol_type = other DNA
gcacactggtatcacggtacttttgtgcgcctgttttatccaccctcccccaatgaaacttagaagcttgattcaaacggtcaatagacaacccagtacaccaactgggtctcgaccaagcacctctgtttccccggactgagtatcaataggctgcttacgtggctgaaggagaaaacgttcgttacccggccaattacttcgagaaacctagtaccaccatgaacgttgcgcagtgtttcgctccacacaaccccagtgtagatcaggtcgatgagtcaccgcattccccacgggtgaccgtggcggtggctgcgctggcggcctgcccatggggtaacccatgggacgctacaatactgacatggtgtgaagagtctattgagctaattggtagtcctccggcccctgaatgcggctaatcctaactgcggagcagatactcacatgccagtgggcagtctgtcgtaacgggcaactctgcagcggaaccgactactttgggtgtccgtgtttccttttattctcatctggctgcttatggtgacaatcgaaagactgttaccatatagctattggattggccatccagtgagtaacagagcgatcattttcctttttgttgggtttataccacttgattacaatagttacaataccttgctatacatcgttcatttgaacacaacaag

SEQ ID NO: 23306 - DNA, 642 bp, synthetic construct
  source 1..642: mol_type = other DNA
caatgaaacttagaagcttgattcaaacggtcaatagacaacccagtacaccaactgggtctcgaccaagcacctctgtttccccggactgagtatcaataggctgcttacgtggctgaaggagaaaacgttcgttacccggccaattacttcgagaaacctagtaccaccatgaacgttgcgcagtgtttcgctccacacaaccccagtgtagatcaggtcgatgagtcaccgcattccccacgggtgaccgtggcggtggctgcgctggcggcctgcccatggggtaacccatgggacgctacaatactgacatggtgtgaagagtctattgagctaattggtagtcctccggcccctgaatgcggctaatcctaactgcggagcagatactcacatgccagtgggcagtctgtcgtaacgggcaactctgcagcggaaccgactactttgggtgtccgtgtttccttttattctcatctggctgcttatggtgacaatcgaaagactgttaccatatagctattggattggccatccagtgagtaacagagcgatcattttcctttttgttgggtttataccacttgattacaatagttacaataccttgctatacatcgttcatttgaacacaacaag

SEQ ID NO: 23307 - DNA, 592 bp, synthetic construct
  source 1..592: mol_type = other DNA
ccaactgggtctcgaccaagcacctctgtttccccggactgagtatcaataggctgcttacgtggctgaaggagaaaacgttcgttacccggccaattacttcgagaaacctagtaccaccatgaacgttgcgcagtgtttcgctccacacaaccccagtgtagatcaggtcgatgagtcaccgcattccccacgggtgaccgtggcggtggctgcgctggcggcctgcccatggggtaacccatgggacgctacaatactgacatggtgtgaagagtctattgagctaattggtagtcctccggcccctgaatgcggctaatcctaactgcggagcagatactcacatgccagtgggcagtctgtcgtaacgggcaactctgcagcggaaccgactactttgggtgtccgtgtttccttttattctcatctggctgcttatggtgacaatcgaaagactgttaccatatagctattggattggccatccagtgagtaacagagcgatcattttcctttttgttgggtttataccacttgattacaatagttacaataccttgctatacatcgttcatttgaacacaacaag

SEQ ID NO: 23308 - DNA, 542 bp, synthetic construct
  source 1..542: mol_type = other DNA
aggctgcttacgtggctgaaggagaaaacgttcgttacccggccaattacttcgagaaacctagtaccaccatgaacgttgcgcagtgtttcgctccacacaaccccagtgtagatcaggtcgatgagtcaccgcattccccacgggtgaccgtggcggtggctgcgctggcggcctgcccatggggtaacccatgggacgctacaatactgacatggtgtgaagagtctattgagctaattggtagtcctccggcccctgaatgcggctaatcctaactgcggagcagatactcacatgccagtgggcagtctgtcgtaacgggcaactctgcagcggaaccgactactttgggtgtccgtgtttccttttattctcatctggctgcttatggtgacaatcgaaagactgttaccatatagctattggattggccatccagtgagtaacagagcgatcattttcctttttgttgggtttataccacttgattacaatagttacaataccttgctatacatcgttcatttgaacacaacaag

SEQ ID NO: 23309 - DNA, 692 bp, synthetic construct
  source 1..692: mol_type = other DNA
cacactggtatcacggtacccttgtgcgcctgttttatcaaccccttcccgatgtaacttagaagccaaatcttaccggtcaacaggtggtccagtatgccaactgggctctgaccaagcacttctgttaccccggactgagtatcaataggctgctcacgcggctgaaggagaaaatgtccgttacccggccaattacttcgagaaacctagtaccaccatgaaggttgcgcggcgtttcgctccacacaaccccagtgcagatcaggtcgatgagccaccgcttcccccacgggcgaccgtggcggtggctgcgttggcggcctgcccatgggacaacccatgggacgcttcaatactgacatggtgcgaagagtctattgagctaattggtagtcctccggcccctgaatgcggctaatcctaactgtggagcagatgcccgcaagccagcgggtggtctgtcgtaacgggcaactccgcagcggaaccgactactttgggtgaccgtgtttccttttatttttatactggctgcttatggtgacaattgaaagattgttaccatatagctattggattggccatccggtgactaacagagctatcatatatctatttgttggttacgtcccacttgactatagagttctacgcaccttatatttcattttagatctgaacaaagcgag

SEQ ID NO: 23310 - DNA, 642 bp, synthetic construct
  source 1..642: mol_type = other DNA
gatgtaacttagaagccaaatcttaccggtcaacaggtggtccagtatgccaactgggctctgaccaagcacttctgttaccccggactgagtatcaataggctgctcacgcggctgaaggagaaaatgtccgttacccggccaattacttcgagaaacctagtaccaccatgaaggttgcgcggcgtttcgctccacacaaccccagtgcagatcaggtcgatgagccaccgcttcccccacgggcgaccgtggcggtggctgcgttggcggcctgcccatgggacaacccatgggacgcttcaatactgacatggtgcgaagagtctattgagctaattggtagtcctccggcccctgaatgcggctaatcctaactgtggagcagatgcccgcaagccagcgggtggtctgtcgtaacgggcaactccgcagcggaaccgactactttgggtgaccgtgtttccttttatttttatactggctgcttatggtgacaattgaaagattgttaccatatagctattggattggccatccggtgactaacagagctatcatatatctatttgttggttacgtcccacttgactatagagttctacgcaccttatatttcattttagatctgaacaaagcgag

SEQ ID NO: 23311 - DNA, 592 bp, synthetic construct
  source 1..592: mol_type = other DNA
caactgggctctgaccaagcacttctgttaccccggactgagtatcaataggctgctcacgcggctgaaggagaaaatgtccgttacccggccaattacttcgagaaacctagtaccaccatgaaggttgcgcggcgtttcgctccacacaaccccagtgcagatcaggtcgatgagccaccgcttcccccacgggcgaccgtggcggtggctgcgttggcggcctgcccatgggacaacccatgggacgcttcaatactgacatggtgcgaagagtctattgagctaattggtagtcctccggcccctgaatgcggctaatcctaactgtggagcagatgcccgcaagccagcgggtggtctgtcgtaacgggcaactccgcagcggaaccgactactttgggtgaccgtgtttccttttatttttatactggctgcttatggtgacaattgaaagattgttaccatatagctattggattggccatccggtgactaacagagctatcatatatctatttgttggttacgtcccacttgactatagagttctacgcaccttatatttcattttagatctgaacaaagcgag

SEQ ID NO: 23312 - DNA, 542 bp, synthetic construct
  source 1..542: mol_type = other DNA
ggctgctcacgcggctgaaggagaaaatgtccgttacccggccaattacttcgagaaacctagtaccaccatgaaggttgcgcggcgtttcgctccacacaaccccagtgcagatcaggtcgatgagccaccgcttcccccacgggcgaccgtggcggtggctgcgttggcggcctgcccatgggacaacccatgggacgcttcaatactgacatggtgcgaagagtctattgagctaattggtagtcctccggcccctgaatgcggctaatcctaactgtggagcagatgcccgcaagccagcgggtggtctgtcgtaacgggcaactccgcagcggaaccgactactttgggtgaccgtgtttccttttatttttatactggctgcttatggtgacaattgaaagattgttaccatatagctattggattggccatccggtgactaacagagctatcatatatctatttgttggttacgtcccacttgactatagagttctacgcaccttatatttcattttagatctgaacaaagcgag

SEQ ID NO: 23313 - DNA, 692 bp, synthetic construct
  source 1..692: mol_type = other DNA
cacactggtattgcggtacctttgtgcgcctgttttattcaccctttcccaatgaaacttagaagcttaactcaaccggtcgatagacagcccagtacaccaactgggttttgaccaagtactcctgtttccccggactgagtatcaataagctgctcgcgcggctgaaggagaaaacgttcgttacccggccaattacttcgagaaacctagtaccaccatgaacgttgcgcagtgtttcgctccgcacaaccccagtgtagatcaggtcgatgagtcaccgcaatccccacgggcgaccgtggcggtggctgcgctggcggcctgcccatggggcatcccatgggacgcttcaatactgacatggtgcgaagagtctattgagctaattggtaatcctccggcccctgaatgcggctaatcctaactgcggggcagacacccacacgccagtgggcagtctgtcgtaacgggtaactccgcagcggaaccgactactttgggtgtccgtgtttccttttatctttatattggctgcttatggtgacaattgaaagattgttgccatatagctattggattggccatccggtgtctaatagagcaattatatatctctttgttggcttcatcccgttaaataaagtgagctaccagaccctgtgctatattatcaaattgaacacaataaa

SEQ ID NO: 23314 - DNA, 642 bp, synthetic construct
  source 1..642: mol_type = other DNA
aatgaaacttagaagcttaactcaaccggtcgatagacagcccagtacaccaactgggttttgaccaagtactcctgtttccccggactgagtatcaataagctgctcgcgcggctgaaggagaaaacgttcgttacccggccaattacttcgagaaacctagtaccaccatgaacgttgcgcagtgtttcgctccgcacaaccccagtgtagatcaggtcgatgagtcaccgcaatccccacgggcgaccgtggcggtggctgcgctggcggcctgcccatggggcatcccatgggacgcttcaatactgacatggtgcgaagagtctattgagctaattggtaatcctccggcccctgaatgcggctaatcctaactgcggggcagacacccacacgccagtgggcagtctgtcgtaacgggtaactccgcagcggaaccgactactttgggtgtccgtgtttccttttatctttatattggctgcttatggtgacaattgaaagattgttgccatatagctattggattggccatccggtgtctaatagagcaattatatatctctttgttggcttcatcccgttaaataaagtgagctaccagaccctgtgctatattatcaaattgaacacaataaa

SEQ ID NO: 23315 - DNA, 592 bp, synthetic construct
  source 1..592: mol_type = other DNA
caactgggttttgaccaagtactcctgtttccccggactgagtatcaataagctgctcgcgcggctgaaggagaaaacgttcgttacccggccaattacttcgagaaacctagtaccaccatgaacgttgcgcagtgtttcgctccgcacaaccccagtgtagatcaggtcgatgagtcaccgcaatccccacgggcgaccgtggcggtggctgcgctggcggcctgcccatggggcatcccatgggacgcttcaatactgacatggtgcgaagagtctattgagctaattggtaatcctccggcccctgaatgcggctaatcctaactgcggggcagacacccacacgccagtgggcagtctgtcgtaacgggtaactccgcagcggaaccgactactttgggtgtccgtgtttccttttatctttatattggctgcttatggtgacaattgaaagattgttgccatatagctattggattggccatccggtgtctaatagagcaattatatatctctttgttggcttcatcccgttaaataaagtgagctaccagaccctgtgctatattatcaaattgaacacaataaa

SEQ ID NO: 23316 - DNA, 542 bp, synthetic construct
  source 1..542: mol_type = other DNA
agctgctcgcgcggctgaaggagaaaacgttcgttacccggccaattacttcgagaaacctagtaccaccatgaacgttgcgcagtgtttcgctccgcacaaccccagtgtagatcaggtcgatgagtcaccgcaatccccacgggcgaccgtggcggtggctgcgctggcggcctgcccatggggcatcccatgggacgcttcaatactgacatggtgcgaagagtctattgagctaattggtaatcctccggcccctgaatgcggctaatcctaactgcggggcagacacccacacgccagtgggcagtctgtcgtaacgggtaactccgcagcggaaccgactactttgggtgtccgtgtttccttttatctttatattggctgcttatggtgacaattgaaagattgttgccatatagctattggattggccatccggtgtctaatagagcaattatatatctctttgttggcttcatcccgttaaataaagtgagctaccagaccctgtgctatattatcaaattgaacacaataaa

SEQ ID NO: 23317 - DNA, 692 bp, synthetic construct
  source 1..692: mol_type = other DNA
cacactggtatcacggtacctttgtgcgcctgttttatcctccctccccaagtgcaacgtagaagcaagacacaaaaggtcaacagatagcccagcacaccagttgggtttcgaccaagcacttctgtctccccggaccgagtatcaataagctgctcacgcggctgaaggagaaagcgttcgttacccggctagttacttcgagaaacccagtaccaccatgaaggttgcgcagcgtttcgctccgcacaaccccagtgtagatcaggtcgatgagtcaccgcgttccccacgggcgaccgtggcggtggctgcgttggcggcctgcccatggggcaacccatgggacgcttcaatactgacatggtgcgaagagtctattgagctaactagtagtcctccggcccctgaatgcggataatcttaactgcggagcaggtgctcacaatccagtgggtggcctgtcgtaacgggcaactctgcagcggaaccgactactttgggtgtccgtgtttccttttatctctttgttggctgcttatggtgacaattgaatgattgttgccatatagctattggattggccatccggtgagcagcagatccattatttaccagtttgttggatttgtaccacttgatcacatagtctttagaacacttgtctttattctaaatcttaacaaggcaag

SEQ ID NO: 23318 - DNA, 642 bp, synthetic construct
  source 1..642: mol_type = other DNA
agtgcaacgtagaagcaagacacaaaaggtcaacagatagcccagcacaccagttgggtttcgaccaagcacttctgtctccccggaccgagtatcaataagctgctcacgcggctgaaggagaaagcgttcgttacccggctagttacttcgagaaacccagtaccaccatgaaggttgcgcagcgtttcgctccgcacaaccccagtgtagatcaggtcgatgagtcaccgcgttccccacgggcgaccgtggcggtggctgcgttggcggcctgcccatggggcaacccatgggacgcttcaatactgacatggtgcgaagagtctattgagctaactagtagtcctccggcccctgaatgcggataatcttaactgcggagcaggtgctcacaatccagtgggtggcctgtcgtaacgggcaactctgcagcggaaccgactactttgggtgtccgtgtttccttttatctctttgttggctgcttatggtgacaattgaatgattgttgccatatagctattggattggccatccggtgagcagcagatccattatttaccagtttgttggatttgtaccacttgatcacatagtctttagaacacttgtctttattctaaatcttaacaaggcaag

SEQ ID NO: 23319 - DNA, 592 bp, synthetic construct
  source 1..592: mol_type = other DNA
cagttgggtttcgaccaagcacttctgtctccccggaccgagtatcaataagctgctcacgcggctgaaggagaaagcgttcgttacccggctagttacttcgagaaacccagtaccaccatgaaggttgcgcagcgtttcgctccgcacaaccccagtgtagatcaggtcgatgagtcaccgcgttccccacgggcgaccgtggcggtggctgcgttggcggcctgcccatggggcaacccatgggacgcttcaatactgacatggtgcgaagagtctattgagctaactagtagtcctccggcccctgaatgcggataatcttaactgcggagcaggtgctcacaatccagtgggtggcctgtcgtaacgggcaactctgcagcggaaccgactactttgggtgtccgtgtttccttttatctctttgttggctgcttatggtgacaattgaatgattgttgccatatagctattggattggccatccggtgagcagcagatccattatttaccagtttgttggatttgtaccacttgatcacatagtctttagaacacttgtctttattctaaatcttaacaaggcaag

SEQ ID NO: 23320 - DNA, 542 bp, synthetic construct
  source 1..542: mol_type = other DNA
agctgctcacgcggctgaaggagaaagcgttcgttacccggctagttacttcgagaaacccagtaccaccatgaaggttgcgcagcgtttcgctccgcacaaccccagtgtagatcaggtcgatgagtcaccgcgttccccacgggcgaccgtggcggtggctgcgttggcggcctgcccatggggcaacccatgggacgcttcaatactgacatggtgcgaagagtctattgagctaactagtagtcctccggcccctgaatgcggataatcttaactgcggagcaggtgctcacaatccagtgggtggcctgtcgtaacgggcaactctgcagcggaaccgactactttgggtgtccgtgtttccttttatctctttgttggctgcttatggtgacaattgaatgattgttgccatatagctattggattggccatccggtgagcagcagatccattatttaccagtttgttggatttgtaccacttgatcacatagtctttagaacacttgtctttattctaaatcttaacaaggcaag

SEQ ID NO: 23321 - DNA, 692 bp, synthetic construct
  source 1..692: mol_type = other DNA
cacactggtattgcggtacctttgtgcgcctgttttatacacccctccttaatgtaactcagaagtacaacattaccggtcaacagatgactcagtaaaccaactgagcctcgaccaagcacttctgtttccccggaccgagtatcaataggctgctcacgcggctgaaggagaaagtgttcgttacccggccaattacttcgagaagcccagtaccaccatggaggttgcgcggcgtttcgctccgcacatccccagtgtagatcaggctgatgagtcaccgcgttccccacgggtgaccgtggcggtggctgcgctggcggcctgcccatggggtaacccatgggacgcttcaatactgacatggtgtgaagagcctattgagctaattggtagtcctccggcccctgaatgcggctaatcctaactgcggagcagatacccacacaccagcgggcagtctgtcgtaacgggcaactctgcagcggaaccgactactttgggtgtccgtgtttccttttatttttatgctggctgcttatggtgacaattgaggaattgttaccatatagctattggattggccatccagtgtccaacagagcgatcatttacctgttcgttgggttcgtaccactaaaccacaagtcactcagcacacttaattacattataactctcaacacaacaag

SEQ ID NO: 23322 - DNA, 642 bp, synthetic construct
  source 1..642: mol_type = other DNA
aatgtaactcagaagtacaacattaccggtcaacagatgactcagtaaaccaactgagcctcgaccaagcacttctgtttccccggaccgagtatcaataggctgctcacgcggctgaaggagaaagtgttcgttacccggccaattacttcgagaagcccagtaccaccatggaggttgcgcggcgtttcgctccgcacatccccagtgtagatcaggctgatgagtcaccgcgttccccacgggtgaccgtggcggtggctgcgctggcggcctgcccatggggtaacccatgggacgcttcaatactgacatggtgtgaagagcctattgagctaattggtagtcctccggcccctgaatgcggctaatcctaactgcggagcagatacccacacaccagcgggcagtctgtcgtaacgggcaactctgcagcggaaccgactactttgggtgtccgtgtttccttttatttttatgctggctgcttatggtgacaattgaggaattgttaccatatagctattggattggccatccagtgtccaacagagcgatcatttacctgttcgttgggttcgtaccactaaaccacaagtcactcagcacacttaattacattataactctcaacacaacaag

SEQ ID NO: 23323 - DNA, 592 bp, synthetic construct
  source 1..592: mol_type = other DNA
caactgagcctcgaccaagcacttctgtttccccggaccgagtatcaataggctgctcacgcggctgaaggagaaagtgttcgttacccggccaattacttcgagaagcccagtaccaccatggaggttgcgcggcgtttcgctccgcacatccccagtgtagatcaggctgatgagtcaccgcgttccccacgggtgaccgtggcggtggctgcgctggcggcctgcccatggggtaacccatgggacgcttcaatactgacatggtgtgaagagcctattgagctaattggtagtcctccggcccctgaatgcggctaatcctaactgcggagcagatacccacacaccagcgggcagtctgtcgtaacgggcaactctgcagcggaaccgactactttgggtgtccgtgtttccttttatttttatgctggctgcttatggtgacaattgaggaattgttaccatatagctattggattggccatccagtgtccaacagagcgatcatttacctgttcgttgggttcgtaccactaaaccacaagtcactcagcacacttaattacattataactctcaacacaacaag

SEQ ID NO: 23324 - DNA, 542 bp, synthetic construct
  source 1..542: mol_type = other DNA
ggctgctcacgcggctgaaggagaaagtgttcgttacccggccaattacttcgagaagcccagtaccaccatggaggttgcgcggcgtttcgctccgcacatccccagtgtagatcaggctgatgagtcaccgcgttccccacgggtgaccgtggcggtggctgcgctggcggcctgcccatggggtaacccatgggacgcttcaatactgacatggtgtgaagagcctattgagctaattggtagtcctccggcccctgaatgcggctaatcctaactgcggagcagatacccacacaccagcgggcagtctgtcgtaacgggcaactctgcagcggaaccgactactttgggtgtccgtgtttccttttatttttatgctggctgcttatggtgacaattgaggaattgttaccatatagctattggattggccatccagtgtccaacagagcgatcatttacctgttcgttgggttcgtaccactaaaccacaagtcactcagcacacttaattacattataactctcaacacaacaag

SEQ ID NO: 23325 - DNA, 692 bp, synthetic construct
  source 1..692: mol_type = other DNA
cacactggtattacggtacctttgtgcgcctgttttatctacccttgcccaatgcaacatagaagcttagtccaaaaggtcaataggcagcccagtgcaccaactgggtccagaccaagcacttctgttaccccggaccaagtatcagtaggctgctcacgcggctgaaggagaaaacgttcgttacccggccaactacttcgagaaacctagtagcaccatgaaggttgcgcagtgtttcgctccgcacagccccagtgtagatcaggtcgatgagccaccgcattccccacgggtgaccgtggcggtggctgcgttggcggcctgcccatggggtaacccatgggacgcttcaatactgacatggtgtgaagagtctattgagctagttggtagtcctccggcccctgaatgcggctaatcctaactgcggagcgtgcgcttgcaacccagtgagtagcacgtcgtaatgggtaactctgcagcggaaccgactactttgggtgtccgtgtttccttttattccttgtctggctgcttatggtgacaattgagagattgttgccatatagctattggattggccatccggtatctaacagggcgatcatttacctgtttgttggtttcatacccttgaatcttgaggtttataataccctcactcttataataaaactcaatacatcaag

SEQ ID NO: 23326 - DNA, 642 bp, synthetic construct
  source 1..642: mol_type = other DNA
aatgcaacatagaagcttagtccaaaaggtcaataggcagcccagtgcaccaactgggtccagaccaagcacttctgttaccccggaccaagtatcagtaggctgctcacgcggctgaaggagaaaacgttcgttacccggccaactacttcgagaaacctagtagcaccatgaaggttgcgcagtgtttcgctccgcacagccccagtgtagatcaggtcgatgagccaccgcattccccacgggtgaccgtggcggtggctgcgttggcggcctgcccatggggtaacccatgggacgcttcaatactgacatggtgtgaagagtctattgagctagttggtagtcctccggcccctgaatgcggctaatcctaactgcggagcgtgcgcttgcaacccagtgagtagcacgtcgtaatgggtaactctgcagcggaaccgactactttgggtgtccgtgtttccttttattccttgtctggctgcttatggtgacaattgagagattgttgccatatagctattggattggccatccggtatctaacagggcgatcatttacctgtttgttggtttcatacccttgaatcttgaggtttataataccctcactcttataataaaactcaatacatcaag

SEQ ID NO: 23327 - DNA, 592 bp, synthetic construct
  source 1..592: mol_type = other DNA
caactgggtccagaccaagcacttctgttaccccggaccaagtatcagtaggctgctcacgcggctgaaggagaaaacgttcgttacccggccaactacttcgagaaacctagtagcaccatgaaggttgcgcagtgtttcgctccgcacagccccagtgtagatcaggtcgatgagccaccgcattccccacgggtgaccgtggcggtggctgcgttggcggcctgcccatggggtaacccatgggacgcttcaatactgacatggtgtgaagagtctattgagctagttggtagtcctccggcccctgaatgcggctaatcctaactgcggagcgtgcgcttgcaacccagtgagtagcacgtcgtaatgggtaactctgcagcggaaccgactactttgggtgtccgtgtttccttttattccttgtctggctgcttatggtgacaattgagagattgttgccatatagctattggattggccatccggtatctaacagggcgatcatttacctgtttgttggtttcatacccttgaatcttgaggtttataataccctcactcttataataaaactcaatacatcaag

SEQ ID NO: 23328 - DNA, 542 bp, synthetic construct
  source 1..542: mol_type = other DNA
ggctgctcacgcggctgaaggagaaaacgttcgttacccggccaactacttcgagaaacctagtagcaccatgaaggttgcgcagtgtttcgctccgcacagccccagtgtagatcaggtcgatgagccaccgcattccccacgggtgaccgtggcggtggctgcgttggcggcctgcccatggggtaacccatgggacgcttcaatactgacatggtgtgaagagtctattgagctagttggtagtcctccggcccctgaatgcggctaatcctaactgcggagcgtgcgcttgcaacccagtgagtagcacgtcgtaatgggtaactctgcagcggaaccgactactttgggtgtccgtgtttccttttattccttgtctggctgcttatggtgacaattgagagattgttgccatatagctattggattggccatccggtatctaacagggcgatcatttacctgtttgttggtttcatacccttgaatcttgaggtttataataccctcactcttataataaaactcaatacatcaag

SEQ ID NO: 23329 - DNA, 692 bp, synthetic construct
  source 1..692: mol_type = other DNA
cacactggtatcacggtacccttgtgcgcctgttttatccacccctccccgaagtaacttagaagctctaaataagcggtcagcagccagcccagcacaccagctgggttttgaccaagtacttctgttaccccggaccgagtatcaataggctgcacacgcggctgaaggagaaaacgttcgttacccggccatctacttcgagaaacctagtaccactatgaaagttgcgaagcgtttcgctccacacaaccccagtgtagatcaggctgatgagtcaccgcattccccacaggtgactgtggcggtggctgcgttggcggcctgcccatggggcaacccatgggacgcttcaataccgacatggtgcgaagagtctattgagctagatggtagtcctccggcccctgaatgcggctaatcctaactgcggagcaggtgcacacaaaccagtgagtagcctgtcgtaatgggcaactctgcagcggaaccgactactttgggtgtccgtgtttctttttattcttatattggctgcttatggtgacaattgaaagattgttaccatatagctattggattggccatccggtgactagcagagcactgatatacctatttgtgggctttgtaccactcaactttgtcagctacaccacattgctatatattgtccaactgaacgcaagaag

SEQ ID NO: 23330 - DNA, 642 bp, synthetic construct
  source 1..642: mol_type = other DNA
gaagtaacttagaagctctaaataagcggtcagcagccagcccagcacaccagctgggttttgaccaagtacttctgttaccccggaccgagtatcaataggctgcacacgcggctgaaggagaaaacgttcgttacccggccatctacttcgagaaacctagtaccactatgaaagttgcgaagcgtttcgctccacacaaccccagtgtagatcaggctgatgagtcaccgcattccccacaggtgactgtggcggtggctgcgttggcggcctgcccatggggcaacccatgggacgcttcaataccgacatggtgcgaagagtctattgagctagatggtagtcctccggcccctgaatgcggctaatcctaactgcggagcaggtgcacacaaaccagtgagtagcctgtcgtaatgggcaactctgcagcggaaccgactactttgggtgtccgtgtttctttttattcttatattggctgcttatggtgacaattgaaagattgttaccatatagctattggattggccatccggtgactagcagagcactgatatacctatttgtgggctttgtaccactcaactttgtcagctacaccacattgctatatattgtccaactgaacgcaagaag

SEQ ID NO: 23331 - DNA, 592 bp, synthetic construct
  source 1..592: mol_type = other DNA
cagctgggttttgaccaagtacttctgttaccccggaccgagtatcaataggctgcacacgcggctgaaggagaaaacgttcgttacccggccatctacttcgagaaacctagtaccactatgaaagttgcgaagcgtttcgctccacacaaccccagtgtagatcaggctgatgagtcaccgcattccccacaggtgactgtggcggtggctgcgttggcggcctgcccatggggcaacccatgggacgcttcaataccgacatggtgcgaagagtctattgagctagatggtagtcctccggcccctgaatgcggctaatcctaactgcggagcaggtgcacacaaaccagtgagtagcctgtcgtaatgggcaactctgcagcggaaccgactactttgggtgtccgtgtttctttttattcttatattggctgcttatggtgacaattgaaagattgttaccatatagctattggattggccatccggtgactagcagagcactgatatacctatttgtgggctttgtaccactcaactttgtcagctacaccacattgctatatattgtccaactgaacgcaagaag

SEQ ID NO: 23332 - DNA, 542 bp, synthetic construct
  source 1..542: mol_type = other DNA
ggctgcacacgcggctgaaggagaaaacgttcgttacccggccatctacttcgagaaacctagtaccactatgaaagttgcgaagcgtttcgctccacacaaccccagtgtagatcaggctgatgagtcaccgcattccccacaggtgactgtggcggtggctgcgttggcggcctgcccatggggcaacccatgggacgcttcaataccgacatggtgcgaagagtctattgagctagatggtagtcctccggcccctgaatgcggctaatcctaactgcggagcaggtgcacacaaaccagtgagtagcctgtcgtaatgggcaactctgcagcggaaccgactactttgggtgtccgtgtttctttttattcttatattggctgcttatggtgacaattgaaagattgttaccatatagctattggattggccatccggtgactagcagagcactgatatacctatttgtgggctttgtaccactcaactttgtcagctacaccacattgctatatattgtccaactgaacgcaagaag

SEQ ID NO: 23333 - DNA, 692 bp, synthetic construct
  source 1..692: mol_type = other DNA
cacactggtattgcggtacctttgtgcgcctgttttatctgcccttccccaatgtaacttagaagttaaactcagacggccaatagacagcccagtacaccaactgggtctcggccaggcacttctgtttccccggactgagtatcaataagctgctcgcgcggctgaaggagaaaacgttcgttatccggccaattacttcgagaaacctagtaccaccatggacgttgcgcagtgtttcgctccgcacaaccccagtgtagatcaggtcgatgagtcaccgcaatccccatgggcgaccgtggcggtggctgcgctggcggcctgcccatgggtcaacccatgggacgcttcaatactgacatggtgtgaagagtctattgagctaattggtagtcctccggcccctgaatgcggctaatcccaactgcggagcagatacccacacgccagtgggcagtctgtcgtaacgggcaactctgcagcggaaccgactactttgggtgtccgtgtttccttttatccttacattggctgcttatggtgacaattgagagattgttaccatatagctattggattggccatccagtgagcaacagagcaattatatttctctttgttgggtttgtaccacttgattttgatagttacaacaccctactttatattgttcgcctgaacacgagaaa

SEQ ID NO: 23334 - DNA, 642 bp, synthetic construct
  source 1..642: mol_type = other DNA
aatgtaacttagaagttaaactcagacggccaatagacagcccagtacaccaactgggtctcggccaggcacttctgtttccccggactgagtatcaataagctgctcgcgcggctgaaggagaaaacgttcgttatccggccaattacttcgagaaacctagtaccaccatggacgttgcgcagtgtttcgctccgcacaaccccagtgtagatcaggtcgatgagtcaccgcaatccccatgggcgaccgtggcggtggctgcgctggcggcctgcccatgggtcaacccatgggacgcttcaatactgacatggtgtgaagagtctattgagctaattggtagtcctccggcccctgaatgcggctaatcccaactgcggagcagatacccacacgccagtgggcagtctgtcgtaacgggcaactctgcagcggaaccgactactttgggtgtccgtgtttccttttatccttacattggctgcttatggtgacaattgagagattgttaccatatagctattggattggccatccagtgagcaacagagcaattatatttctctttgttgggtttgtaccacttgattttgatagttacaacaccctactttatattgttcgcctgaacacgagaaa

SEQ ID NO: 23335 - DNA, 592 bp, synthetic construct
  source 1..592: mol_type = other DNA
caactgggtctcggccaggcacttctgtttccccggactgagtatcaataagctgctcgcgcggctgaaggagaaaacgttcgttatccggccaattacttcgagaaacctagtaccaccatggacgttgcgcagtgtttcgctccgcacaaccccagtgtagatcaggtcgatgagtcaccgcaatccccatgggcgaccgtggcggtggctgcgctggcggcctgcccatgggtcaacccatgggacgcttcaatactgacatggtgtgaagagtctattgagctaattggtagtcctccggcccctgaatgcggctaatcccaactgcggagcagatacccacacgccagtgggcagtctgtcgtaacgggcaactctgcagcggaaccgactactttgggtgtccgtgtttccttttatccttacattggctgcttatggtgacaattgagagattgttaccatatagctattggattggccatccagtgagcaacagagcaattatatttctctttgttgggtttgtaccacttgattttgatagttacaacaccctactttatattgttcgcctgaacacgagaaa

SEQ ID NO: 23336 - DNA, 542 bp, synthetic construct
  source 1..542: mol_type = other DNA
agctgctcgcgcggctgaaggagaaaacgttcgttatccggccaattacttcgagaaacctagtaccaccatggacgttgcgcagtgtttcgctccgcacaaccccagtgtagatcaggtcgatgagtcaccgcaatccccatgggcgaccgtggcggtggctgcgctggcggcctgcccatgggtcaacccatgggacgcttcaatactgacatggtgtgaagagtctattgagctaattggtagtcctccggcccctgaatgcggctaatcccaactgcggagcagatacccacacgccagtgggcagtctgtcgtaacgggcaactctgcagcggaaccgactactttgggtgtccgtgtttccttttatccttacattggctgcttatggtgacaattgagagattgttaccatatagctattggattggccatccagtgagcaacagagcaattatatttctctttgttgggtttgtaccacttgattttgatagttacaacaccctactttatattgttcgcctgaacacgagaaa

SEQ ID NO: 23337 - DNA, 692 bp, synthetic construct
  source 1..692: mol_type = other DNA
gtactccggtattgcggtacccttgtacgcctgttttatactcccttcccccgtaacttagaagaaataaaccaagttcactaggagggggtacaaaccagtaccaccacgaacaagcacttctgtttccccggtgacattgcatagactgtacccacggttgaaagcgactgatccgttacccgctactgtacttcgagaagcctagtaccatcttggaatcttcgacgcgttgcgctcagcactcaaccccagagtgtagcttaggtcgatgagtctggacaatccccaccggtgacggtggtccaggctgcgttggcggcctacctgtggcccaaagccacaggacgctagttgtgaacaaggtgtgaagagcctattgagcttcagtagagtcctccggcccctgaatgcggctaatcccaaccacggagcaggtggtcataatccaatgactggcctgtcgtaacgcgcaagtctgtggcggaaccgactactttgggtgtccgtgtttccttttattttgtcaatggctgcttatggtgacaatctaagattgccatcatatagcttttggattggccatccggtattattttgagttatttgatttgttgtccacagctctttacagtatcacttaactattattgtttgtattttgctccttggatcacaaccaggtaatcaga

SEQ ID NO: 23338 - DNA, 642 bp, synthetic construct
  source 1..642: mol_type = other DNA
ccgtaacttagaagaaataaaccaagttcactaggagggggtacaaaccagtaccaccacgaacaagcacttctgtttccccggtgacattgcatagactgtacccacggttgaaagcgactgatccgttacccgctactgtacttcgagaagcctagtaccatcttggaatcttcgacgcgttgcgctcagcactcaaccccagagtgtagcttaggtcgatgagtctggacaatccccaccggtgacggtggtccaggctgcgttggcggcctacctgtggcccaaagccacaggacgctagttgtgaacaaggtgtgaagagcctattgagcttcagtagagtcctccggcccctgaatgcggctaatcccaaccacggagcaggtggtcataatccaatgactggcctgtcgtaacgcgcaagtctgtggcggaaccgactactttgggtgtccgtgtttccttttattttgtcaatggctgcttatggtgacaatctaagattgccatcatatagcttttggattggccatccggtattattttgagttatttgatttgttgtccacagctctttacagtatcacttaactattattgtttgtattttgctccttggatcacaaccaggtaatcaga

SEQ ID NO: 23339 - DNA, 592 bp, synthetic construct
  source 1..592: mol_type = other DNA
gtaccaccacgaacaagcacttctgtttccccggtgacattgcatagactgtacccacggttgaaagcgactgatccgttacccgctactgtacttcgagaagcctagtaccatcttggaatcttcgacgcgttgcgctcagcactcaaccccagagtgtagcttaggtcgatgagtctggacaatccccaccggtgacggtggtccaggctgcgttggcggcctacctgtggcccaaagccacaggacgctagttgtgaacaaggtgtgaagagcctattgagcttcagtagagtcctccggcccctgaatgcggctaatcccaaccacggagcaggtggtcataatccaatgactggcctgtcgtaacgcgcaagtctgtggcggaaccgactactttgggtgtccgtgtttccttttattttgtcaatggctgcttatggtgacaatctaagattgccatcatatagcttttggattggccatccggtattattttgagttatttgatttgttgtccacagctctttacagtatcacttaactattattgtttgtattttgctccttggatcacaaccaggtaatcaga

SEQ ID NO: 23340 - DNA, 542 bp, synthetic construct
  source 1..542: mol_type = other DNA
gtacccacggttgaaagcgactgatccgttacccgctactgtacttcgagaagcctagtaccatcttggaatcttcgacgcgttgcgctcagcactcaaccccagagtgtagcttaggtcgatgagtctggacaatccccaccggtgacggtggtccaggctgcgttggcggcctacctgtggcccaaagccacaggacgctagttgtgaacaaggtgtgaagagcctattgagcttcagtagagtcctccggcccctgaatgcggctaatcccaaccacggagcaggtggtcataatccaatgactggcctgtcgtaacgcgcaagtctgtggcggaaccgactactttgggtgtccgtgtttccttttattttgtcaatggctgcttatggtgacaatctaagattgccatcatatagcttttggattggccatccggtattattttgagttatttgatttgttgtccacagctctttacagtatcacttaactattattgtttgtattttgctccttggatcacaaccaggtaatcaga

SEQ ID NO: 23341 - DNA, 692 bp, synthetic construct
  source 1..692: mol_type = other DNA
cactctggtattacggtacctttgtgcgcctgttttatgtcccctcccccaatcgcaacttagaagcaacacacactgatcaacagtaagcgtggcataccagccacgttttgatcaagcacttctgttaccccggactgagtatcaatagactgctcacgcggttgaaggagaaagcgttcgttatccggccaactacttcgagaaacctagtaacaccgtgaaagttgcagagtgtttcgctcagcactaccccagtgtagatcaggtcgatgagtcaccgcattccccacgggcgaccgtggcggtggctgcgctggcggcctgcctacggggaaacccgtaggacgctctaatacagacatggtgcgaagagtctattgagctagttggtagtcctccggcccctgaatgcggctaatcctaactgcggagcacacacccccaagccagggggcagtgtgtcgtaacgggtaactctgcagcggaaccgactactttgggtgtccgtgtttcattttattcctatgctggctgcttatggtgacaattgacagattgttaccatatagctattggattggccatccggtgactaatagagccattatataccactttgttgggtttataccactcaacttgaaagaggtcaaaacactacagctcatcattaaattgaacacaacaaa

SEQ ID NO: 23342 - DNA, 642 bp, synthetic construct
  source 1..642: mol_type = other DNA
aatcgcaacttagaagcaacacacactgatcaacagtaagcgtggcataccagccacgttttgatcaagcacttctgttaccccggactgagtatcaatagactgctcacgcggttgaaggagaaagcgttcgttatccggccaactacttcgagaaacctagtaacaccgtgaaagttgcagagtgtttcgctcagcactaccccagtgtagatcaggtcgatgagtcaccgcattccccacgggcgaccgtggcggtggctgcgctggcggcctgcctacggggaaacccgtaggacgctctaatacagacatggtgcgaagagtctattgagctagttggtagtcctccggcccctgaatgcggctaatcctaactgcggagcacacacccccaagccagggggcagtgtgtcgtaacgggtaactctgcagcggaaccgactactttgggtgtccgtgtttcattttattcctatgctggctgcttatggtgacaattgacagattgttaccatatagctattggattggccatccggtgactaatagagccattatataccactttgttgggtttataccactcaacttgaaagaggtcaaaacactacagctcatcattaaattgaacacaacaaa

SEQ ID NO: 23343 - DNA, 592 bp, synthetic construct
  source 1..592: mol_type = other DNA
cagccacgttttgatcaagcacttctgttaccccggactgagtatcaatagactgctcacgcggttgaaggagaaagcgttcgttatccggccaactacttcgagaaacctagtaacaccgtgaaagttgcagagtgtttcgctcagcactaccccagtgtagatcaggtcgatgagtcaccgcattccccacgggcgaccgtggcggtggctgcgctggcggcctgcctacggggaaacccgtaggacgctctaatacagacatggtgcgaagagtctattgagctagttggtagtcctccggcccctgaatgcggctaatcctaactgcggagcacacacccccaagccagggggcagtgtgtcgtaacgggtaactctgcagcggaaccgactactttgggtgtccgtgtttcattttattcctatgctggctgcttatggtgacaattgacagattgttaccatatagctattggattggccatccggtgactaatagagccattatataccactttgttgggtttataccactcaacttgaaagaggtcaaaacactacagctcatcattaaattgaacacaacaaa

SEQ ID NO: 23344 - DNA, 542 bp, synthetic construct
  source 1..542: mol_type = other DNA
gactgctcacgcggttgaaggagaaagcgttcgttatccggccaactacttcgagaaacctagtaacaccgtgaaagttgcagagtgtttcgctcagcactaccccagtgtagatcaggtcgatgagtcaccgcattccccacgggcgaccgtggcggtggctgcgctggcggcctgcctacggggaaacccgtaggacgctctaatacagacatggtgcgaagagtctattgagctagttggtagtcctccggcccctgaatgcggctaatcctaactgcggagcacacacccccaagccagggggcagtgtgtcgtaacgggtaactctgcagcggaaccgactactttgggtgtccgtgtttcattttattcctatgctggctgcttatggtgacaattgacagattgttaccatatagctattggattggccatccggtgactaatagagccattatataccactttgttgggtttataccactcaacttgaaagaggtcaaaacactacagctcatcattaaattgaacacaacaaa

SEQ ID NO: 23345 - DNA, 692 bp, synthetic construct
  source 1..692: mol_type = other DNA
gcactctggtatcacggtacccttgtgcgcctgttttatatccccaccccagtggaacattagaagcagcacacctatgatcaatagtgggcgtggcatccagtcacgttatgatcaagcacttctgtgaccccggactgagtatcaatagactgctcacgcggttgaaggagaaaacgttcgttacccggccagttacttcgagaaacccagtaacaccatgaatgttgcagagtgtttcgctcagcacttcccccgtgtagatcaggtcgatgagccactgcattccccacgggcgaccgtggcagtggctgcgttggcggcctgcctatggggtcacccataggacgctctaatactgacatggtgcgaagagtctattgagctaactggtagtcctccggcccctgaatgcggctaatcctaactgtggagcacattcccccaatccagggggcagtgtgtcgtaacgggcaactctgcagcggaaccgactactttgggtgtccgtgtttctttttattctcatattggctgcttatggtgacaattacagaattgttaccatatagctattggattggccatccggtgactaacagagcaattatttatcaattcgttggatttgtcccactcgatttcaaagcagtcaatacactctcatatatcgttacactcaacacaacaaa

SEQ ID NO: 23346 - DNA, 642 bp, synthetic construct
  source 1..642: mol_type = other DNA
agtggaacattagaagcagcacacctatgatcaatagtgggcgtggcatccagtcacgttatgatcaagcacttctgtgaccccggactgagtatcaatagactgctcacgcggttgaaggagaaaacgttcgttacccggccagttacttcgagaaacccagtaacaccatgaatgttgcagagtgtttcgctcagcacttcccccgtgtagatcaggtcgatgagccactgcattccccacgggcgaccgtggcagtggctgcgttggcggcctgcctatggggtcacccataggacgctctaatactgacatggtgcgaagagtctattgagctaactggtagtcctccggcccctgaatgcggctaatcctaactgtggagcacattcccccaatccagggggcagtgtgtcgtaacgggcaactctgcagcggaaccgactactttgggtgtccgtgtttctttttattctcatattggctgcttatggtgacaattacagaattgttaccatatagctattggattggccatccggtgactaacagagcaattatttatcaattcgttggatttgtcccactcgatttcaaagcagtcaatacactctcatatatcgttacactcaacacaacaaa

SEQ ID NO: 23347 - DNA, 592 bp, synthetic construct
  source 1..592: mol_type = other DNA
cagtcacgttatgatcaagcacttctgtgaccccggactgagtatcaatagactgctcacgcggttgaaggagaaaacgttcgttacccggccagttacttcgagaaacccagtaacaccatgaatgttgcagagtgtttcgctcagcacttcccccgtgtagatcaggtcgatgagccactgcattccccacgggcgaccgtggcagtggctgcgttggcggcctgcctatggggtcacccataggacgctctaatactgacatggtgcgaagagtctattgagctaactggtagtcctccggcccctgaatgcggctaatcctaactgtggagcacattcccccaatccagggggcagtgtgtcgtaacgggcaactctgcagcggaaccgactactttgggtgtccgtgtttctttttattctcatattggctgcttatggtgacaattacagaattgttaccatatagctattggattggccatccggtgactaacagagcaattatttatcaattcgttggatttgtcccactcgatttcaaagcagtcaatacactctcatatatcgttacactcaacacaacaaa

SEQ ID NO: 23348 - DNA, 542 bp, synthetic construct
  source 1..542: mol_type = other DNA
gactgctcacgcggttgaaggagaaaacgttcgttacccggccagttacttcgagaaacccagtaacaccatgaatgttgcagagtgtttcgctcagcacttcccccgtgtagatcaggtcgatgagccactgcattccccacgggcgaccgtggcagtggctgcgttggcggcctgcctatggggtcacccataggacgctctaatactgacatggtgcgaagagtctattgagctaactggtagtcctccggcccctgaatgcggctaatcctaactgtggagcacattcccccaatccagggggcagtgtgtcgtaacgggcaactctgcagcggaaccgactactttgggtgtccgtgtttctttttattctcatattggctgcttatggtgacaattacagaattgttaccatatagctattggattggccatccggtgactaacagagcaattatttatcaattcgttggatttgtcccactcgatttcaaagcagtcaatacactctcatatatcgttacactcaacacaacaaa

SEQ ID NO: 23349 - DNA, 692 bp, synthetic construct
  source 1..692: mol_type = other DNA
cacactggtatcacggtacctttgtgcgcctgttttatccacccttccccaagtgacttagaagcataccacacacggtcaacaggcggctcaatgcaccaattgagtcatgaccaagtacttctgttaccccggacttagtatcaataagctgctcacgcggctgaaggagaaaacgttcgttacccggccaattacttcgagaaacctagtagcaccatggaggttgcgcggcgtttcgctccacacaaccccagtgtagatcaggctgatgagtcaccacaatcctcacgggcgaccgtggtggtggctgcgctggcggcctgcccatggggtaacccatgggacgctacaatactgacatggtgtgaagagtctattgagctaattggtagtcctccggcccctgaatgcggctaatcctaactgcggagcagatacccacacaccagtgggcagtctgtcgtaacgggcaactctgcagcggaaccgactactttgggtgtccgtgtttccttttttctcttatactggctgcttatggtgacaattgaaagattgttaccatatagctattggattggccatccagtgacaaacagagcgattgtttacctgttcattggtttcgtaccgctgaattacacagttttaaacacccttaatcttattttggcacttaatacatcaaa

SEQ ID NO: 23350 - DNA, 642 bp, synthetic construct
  source 1..642: mol_type = other DNA
aagtgacttagaagcataccacacacggtcaacaggcggctcaatgcaccaattgagtcatgaccaagtacttctgttaccccggacttagtatcaataagctgctcacgcggctgaaggagaaaacgttcgttacccggccaattacttcgagaaacctagtagcaccatggaggttgcgcggcgtttcgctccacacaaccccagtgtagatcaggctgatgagtcaccacaatcctcacgggcgaccgtggtggtggctgcgctggcggcctgcccatggggtaacccatgggacgctacaatactgacatggtgtgaagagtctattgagctaattggtagtcctccggcccctgaatgcggctaatcctaactgcggagcagatacccacacaccagtgggcagtctgtcgtaacgggcaactctgcagcggaaccgactactttgggtgtccgtgtttccttttttctcttatactggctgcttatggtgacaattgaaagattgttaccatatagctattggattggccatccagtgacaaacagagcgattgtttacctgttcattggtttcgtaccgctgaattacacagttttaaacacccttaatcttattttggcacttaatacatcaaa

SEQ ID NO: 23351 - DNA, 592 bp, synthetic construct
  source 1..592: mol_type = other DNA
aattgagtcatgaccaagtacttctgttaccccggacttagtatcaataagctgctcacgcggctgaaggagaaaacgttcgttacccggccaattacttcgagaaacctagtagcaccatggaggttgcgcggcgtttcgctccacacaaccccagtgtagatcaggctgatgagtcaccacaatcctcacgggcgaccgtggtggtggctgcgctggcggcctgcccatggggtaacccatgggacgctacaatactgacatggtgtgaagagtctattgagctaattggtagtcctccggcccctgaatgcggctaatcctaactgcggagcagatacccacacaccagtgggcagtctgtcgtaacgggcaactctgcagcggaaccgactactttgggtgtccgtgtttccttttttctcttatactggctgcttatggtgacaattgaaagattgttaccatatagctattggattggccatccagtgacaaacagagcgattgtttacctgttcattggtttcgtaccgctgaattacacagttttaaacacccttaatcttattttggcacttaatacatcaaa

SEQ ID NO: 23352 - DNA, 542 bp, synthetic construct
  source 1..542: mol_type = other DNA
gctgctcacgcggctgaaggagaaaacgttcgttacccggccaattacttcgagaaacctagtagcaccatggaggttgcgcggcgtttcgctccacacaaccccagtgtagatcaggctgatgagtcaccacaatcctcacgggcgaccgtggtggtggctgcgctggcggcctgcccatggggtaacccatgggacgctacaatactgacatggtgtgaagagtctattgagctaattggtagtcctccggcccctgaatgcggctaatcctaactgcggagcagatacccacacaccagtgggcagtctgtcgtaacgggcaactctgcagcggaaccgactactttgggtgtccgtgtttccttttttctcttatactggctgcttatggtgacaattgaaagattgttaccatatagctattggattggccatccagtgacaaacagagcgattgtttacctgttcattggtttcgtaccgctgaattacacagttttaaacacccttaatcttattttggcacttaatacatcaaa

SEQ ID NO: 23353 - DNA, 692 bp, synthetic construct
  source 1..692: mol_type = other DNA
cacactggtatcacggtacctttgtgcgcctgttttataaccccttccccaaacgtaacgtagaagctacacacactgatcaatagtaggcacagcgcaccagttgtgtcccgatcaagcacttctgtctccccggaccgagtatcaatagactgctcacgcggttgaaggagaaaacgttcgttaaccggctgactacttcgagaaacctagtagtactatgaaagttgcgaagcgtttcactcagcacttcccccgtgtagatcaggctgatgagtcactgcgttccccacgggtgaccgtggcagtgactgcgttggcggcctgcccatggggtaacccatgggacgcttcaatacggacatggtgcgaagagtctattgagctagccagtagtcctccggcccctgaatgcggctaatcctaactgcggagcatgtgccctcgatccagggggtagcgtgtcgtaacgggcaactctgcagcggaaccgactactttgggtgtccgtgtttctttttattcttatattggctgcttatggtgacaattgagagattgttaccatatagctattggattggccacccggtgactaatagagctattatctactcctttataggttttgtgccgttgaactacaaggtcttaaggactctcaactttatcataatacttaatactgcaaa

SEQ ID NO: 23354 - DNA, 642 bp, synthetic construct
  source 1..642: mol_type = other DNA
aaacgtaacgtagaagctacacacactgatcaatagtaggcacagcgcaccagttgtgtcccgatcaagcacttctgtctccccggaccgagtatcaatagactgctcacgcggttgaaggagaaaacgttcgttaaccggctgactacttcgagaaacctagtagtactatgaaagttgcgaagcgtttcactcagcacttcccccgtgtagatcaggctgatgagtcactgcgttccccacgggtgaccgtggcagtgactgcgttggcggcctgcccatggggtaacccatgggacgcttcaatacggacatggtgcgaagagtctattgagctagccagtagtcctccggcccctgaatgcggctaatcctaactgcggagcatgtgccctcgatccagggggtagcgtgtcgtaacgggcaactctgcagcggaaccgactactttgggtgtccgtgtttctttttattcttatattggctgcttatggtgacaattgagagattgttaccatatagctattggattggccacccggtgactaatagagctattatctactcctttataggttttgtgccgttgaactacaaggtcttaaggactctcaactttatcataatacttaatactgcaaa

SEQ ID NO: 23355 - DNA, 592 bp, synthetic construct
  source 1..592: mol_type = other DNA
cagttgtgtcccgatcaagcacttctgtctccccggaccgagtatcaatagactgctcacgcggttgaaggagaaaacgttcgttaaccggctgactacttcgagaaacctagtagtactatgaaagttgcgaagcgtttcactcagcacttcccccgtgtagatcaggctgatgagtcactgcgttccccacgggtgaccgtggcagtgactgcgttggcggcctgcccatggggtaacccatgggacgcttcaatacggacatggtgcgaagagtctattgagctagccagtagtcctccggcccctgaatgcggctaatcctaactgcggagcatgtgccctcgatccagggggtagcgtgtcgtaacgggcaactctgcagcggaaccgactactttgggtgtccgtgtttctttttattcttatattggctgcttatggtgacaattgagagattgttaccatatagctattggattggccacccggtgactaatagagctattatctactcctttataggttttgtgccgttgaactacaaggtcttaaggactctcaactttatcataatacttaatactgcaaa

SEQ ID NO: 23356 - DNA, 542 bp, synthetic construct
  source 1..542: mol_type = other DNA
gactgctcacgcggttgaaggagaaaacgttcgttaaccggctgactacttcgagaaacctagtagtactatgaaagttgcgaagcgtttcactcagcacttcccccgtgtagatcaggctgatgagtcactgcgttccccacgggtgaccgtggcagtgactgcgttggcggcctgcccatggggtaacccatgggacgcttcaatacggacatggtgcgaagagtctattgagctagccagtagtcctccggcccctgaatgcggctaatcctaactgcggagcatgtgccctcgatccagggggtagcgtgtcgtaacgggcaactctgcagcggaaccgactactttgggtgtccgtgtttctttttattcttatattggctgcttatggtgacaattgagagattgttaccatatagctattggattggccacccggtgactaatagagctattatctactcctttataggttttgtgccgttgaactacaaggtcttaaggactctcaactttatcataatacttaatactgcaaa

SEQ ID NO: 23357 - DNA, 692 bp, synthetic construct
  source 1..692: mol_type = other DNA
cacactggtatcaaggtacctttgtgcgcctgttttattcacccttccccttcgtaacttagaagcatagctcagacggtcaatagacagcccagcataccagctgggtcatgaccaagcacttctgttgccccggactgagtatcaataggctgcttgcgcggctgaaggagaaaagttcgttacccggccagttacttcgagaaacctagtaacaccatggaagttgcgtagtgtttcgctccgcacaaccccagtgtagatcaggtcgatgagtcaccgcataccccacgggtgaccgtggcggtggctgcgttggcggcctgcccatggggcatacccatgggacgctacaatactgacatggtgcgaagagtctattgagctaattggtagtcctccggcccctgaatgcggctaatcctaactgcggagcagatacccacacaccagtgggcggtctgtcgtaacgggtaactctgcagcggaaccgactactttgggtgtccgtgtttccttttattcctaatctggctgcttatggtgacaattgagagattgttaccatatagctattggattggccatccggtgactaacagagcgatcatctacctgtttgttggtttcattccactaaactacaaagtactaaacactctgaattacattttactgcttaactcatcaaa

SEQ ID NO: 23358 - DNA, 642 bp, synthetic construct
  source 1..642: mol_type = other DNA
ttcgtaacttagaagcatagctcagacggtcaatagacagcccagcataccagctgggtcatgaccaagcacttctgttgccccggactgagtatcaataggctgcttgcgcggctgaaggagaaaagttcgttacccggccagttacttcgagaaacctagtaacaccatggaagttgcgtagtgtttcgctccgcacaaccccagtgtagatcaggtcgatgagtcaccgcataccccacgggtgaccgtggcggtggctgcgttggcggcctgcccatggggcatacccatgggacgctacaatactgacatggtgcgaagagtctattgagctaattggtagtcctccggcccctgaatgcggctaatcctaactgcggagcagatacccacacaccagtgggcggtctgtcgtaacgggtaactctgcagcggaaccgactactttgggtgtccgtgtttccttttattcctaatctggctgcttatggtgacaattgagagattgttaccatatagctattggattggccatccggtgactaacagagcgatcatctacctgtttgttggtttcattccactaaactacaaagtactaaacactctgaattacattttactgcttaactcatcaaa

SEQ ID NO: 23359 - DNA, 592 bp, synthetic construct
  source 1..592: mol_type = other DNA
cagctgggtcatgaccaagcacttctgttgccccggactgagtatcaataggctgcttgcgcggctgaaggagaaaagttcgttacccggccagttacttcgagaaacctagtaacaccatggaagttgcgtagtgtttcgctccgcacaaccccagtgtagatcaggtcgatgagtcaccgcataccccacgggtgaccgtggcggtggctgcgttggcggcctgcccatggggcatacccatgggacgctacaatactgacatggtgcgaagagtctattgagctaattggtagtcctccggcccctgaatgcggctaatcctaactgcggagcagatacccacacaccagtgggcggtctgtcgtaacgggtaactctgcagcggaaccgactactttgggtgtccgtgtttccttttattcctaatctggctgcttatggtgacaattgagagattgttaccatatagctattggattggccatccggtgactaacagagcgatcatctacctgtttgttggtttcattccactaaactacaaagtactaaacactctgaattacattttactgcttaactcatcaaa

SEQ ID NO: 23360 - DNA, 542 bp, synthetic construct
  source 1..542: mol_type = other DNA
ggctgcttgcgcggctgaaggagaaaagttcgttacccggccagttacttcgagaaacctagtaacaccatggaagttgcgtagtgtttcgctccgcacaaccccagtgtagatcaggtcgatgagtcaccgcataccccacgggtgaccgtggcggtggctgcgttggcggcctgcccatggggcatacccatgggacgctacaatactgacatggtgcgaagagtctattgagctaattggtagtcctccggcccctgaatgcggctaatcctaactgcggagcagatacccacacaccagtgggcggtctgtcgtaacgggtaactctgcagcggaaccgactactttgggtgtccgtgtttccttttattcctaatctggctgcttatggtgacaattgagagattgttaccatatagctattggattggccatccggtgactaacagagcgatcatctacctgtttgttggtttcattccactaaactacaaagtactaaacactctgaattacattttactgcttaactcatcaaa

SEQ ID NO: 23361 - DNA, 693 bp, synthetic construct
  source 1..693: mol_type = other DNA
tacactggtatctcggtacctttgtacgcctgttttataccccctccctgatttgcaacttagaagcaacgcaaaccagatcaatagtaggtgtgacataccagtcgcatcttgatcaagcacttctgtatccccggaccgagtatcaatagactgtgcacacggttgaaggagaaaacgtccgttacccggctaactacttcgagaagcctagtaacgccattgaagttgcagagtgtttcgctcagcactccccccgtgtagatcaggtcgatgagtcaccgcattccccacgggcgaccgtggcggtggctgcgttggcggcctgcctatggggtaacccataggacgctctaatacggacatggcgtgaagagtctattgagctagttagtagtcctccggcccctgaatgcggctaatcctaactgcggagcacatacccttaatccaaagggcagtgtgtcgtaacgggcaactctgcagcggaaccgactactttgggtgtccgtgtttctttttattcttgtattggctgcttatggtgacaattaaagaattgttaccatatagctattggattggccatccagtgtcaaacagagctattgtatatctctttgttggattcacacctctcactcttgaaacgttacacaccctcaattacattatactgctgaacacgaagcg

SEQ ID NO: 23362 - DNA, 643 bp, synthetic construct
  source 1..643: mol_type = other DNA
atttgcaacttagaagcaacgcaaaccagatcaatagtaggtgtgacataccagtcgcatcttgatcaagcacttctgtatccccggaccgagtatcaatagactgtgcacacggttgaaggagaaaacgtccgttacccggctaactacttcgagaagcctagtaacgccattgaagttgcagagtgtttcgctcagcactccccccgtgtagatcaggtcgatgagtcaccgcattccccacgggcgaccgtggcggtggctgcgttggcggcctgcctatggggtaacccataggacgctctaatacggacatggcgtgaagagtctattgagctagttagtagtcctccggcccctgaatgcggctaatcctaactgcggagcacatacccttaatccaaagggcagtgtgtcgtaacgggcaactctgcagcggaaccgactactttgggtgtccgtgtttctttttattcttgtattggctgcttatggtgacaattaaagaattgttaccatatagctattggattggccatccagtgtcaaacagagctattgtatatctctttgttggattcacacctctcactcttgaaacgttacacaccctcaattacattatactgctgaacacgaagcg

SEQ ID NO: 23363 - DNA, 593 bp, synthetic construct
  source 1..593: mol_type = other DNA
ccagtcgcatcttgatcaagcacttctgtatccccggaccgagtatcaatagactgtgcacacggttgaaggagaaaacgtccgttacccggctaactacttcgagaagcctagtaacgccattgaagttgcagagtgtttcgctcagcactccccccgtgtagatcaggtcgatgagtcaccgcattccccacgggcgaccgtggcggtggctgcgttggcggcctgcctatggggtaacccataggacgctctaatacggacatggcgtgaagagtctattgagctagttagtagtcctccggcccctgaatgcggctaatcctaactgcggagcacatacccttaatccaaagggcagtgtgtcgtaacgggcaactctgcagcggaaccgactactttgggtgtccgtgtttctttttattcttgtattggctgcttatggtgacaattaaagaattgttaccatatagctattggattggccatccagtgtcaaacagagctattgtatatctctttgttggattcacacctctcactcttgaaacgttacacaccctcaattacattatactgctgaacacgaagcg

SEQ ID NO: 23364 - DNA, 543 bp, synthetic construct
  source 1..543: mol_type = other DNA
agactgtgcacacggttgaaggagaaaacgtccgttacccggctaactacttcgagaagcctagtaacgccattgaagttgcagagtgtttcgctcagcactccccccgtgtagatcaggtcgatgagtcaccgcattccccacgggcgaccgtggcggtggctgcgttggcggcctgcctatggggtaacccataggacgctctaatacggacatggcgtgaagagtctattgagctagttagtagtcctccggcccctgaatgcggctaatcctaactgcggagcacatacccttaatccaaagggcagtgtgtcgtaacgggcaactctgcagcggaaccgactactttgggtgtccgtgtttctttttattcttgtattggctgcttatggtgacaattaaagaattgttaccatatagctattggattggccatccagtgtcaaacagagctattgtatatctctttgttggattcacacctctcactcttgaaacgttacacaccctcaattacattatactgctgaacacgaagcg

SEQ ID NO: 23365 - DNA, 693 bp, synthetic construct
  source 1..693: mol_type = other DNA
cactctggcacttcggtacctttgtgcgcctgttttatatcccctcccccaatgaaatttagaagcagcaaaccccgatcaatagcaggcataacgctccagttatgtcttgatcaagcacttctgtttccccggactgagtatcaatagactgctcacgcggttgaaggagaaaacgttcgttatccggctaactacttcggaaagcctagtaacaccatggaagttgcggagagtttcgttcagcacttccccagtgtagatcaggtcgatgagtcaccgcattccccacgggcgaccgtggcggtggctgcgttggcggcctgcccatggggtaacccatgggacgctctaatacggacatggtgtgaagagtctactgagctagttagtagtcctccggcccctgaatgcggctaatcccaactgcggagcacacgcccacaagccagtgggtagtgtgtcgtaacgggcaactctgcagcggaaccgactactttgggtgtccgtgtttccttttattcttatgttggctgcttatggtgacaattaaagagttgttaccatatagctattggattggccatccggtgtgcaacagagcgatcgtttacctatttattggttttgtaccattgacactgaagtctgtgatcacccttaattttatcttaaccctcaacacagccaaac

SEQ ID NO: 23366 - DNA, 643 bp, synthetic construct
  source 1..643: mol_type = other DNA
aatgaaatttagaagcagcaaaccccgatcaatagcaggcataacgctccagttatgtcttgatcaagcacttctgtttccccggactgagtatcaatagactgctcacgcggttgaaggagaaaacgttcgttatccggctaactacttcggaaagcctagtaacaccatggaagttgcggagagtttcgttcagcacttccccagtgtagatcaggtcgatgagtcaccgcattccccacgggcgaccgtggcggtggctgcgttggcggcctgcccatggggtaacccatgggacgctctaatacggacatggtgtgaagagtctactgagctagttagtagtcctccggcccctgaatgcggctaatcccaactgcggagcacacgcccacaagccagtgggtagtgtgtcgtaacgggcaactctgcagcggaaccgactactttgggtgtccgtgtttccttttattcttatgttggctgcttatggtgacaattaaagagttgttaccatatagctattggattggccatccggtgtgcaacagagcgatcgtttacctatttattggttttgtaccattgacactgaagtctgtgatcacccttaattttatcttaaccctcaacacagccaaac

SEQ ID NO: 23367 - DNA, 593 bp, synthetic construct
  source 1..593: mol_type = other DNA
agttatgtcttgatcaagcacttctgtttccccggactgagtatcaatagactgctcacgcggttgaaggagaaaacgttcgttatccggctaactacttcggaaagcctagtaacaccatggaagttgcggagagtttcgttcagcacttccccagtgtagatcaggtcgatgagtcaccgcattccccacgggcgaccgtggcggtggctgcgttggcggcctgcccatggggtaacccatgggacgctctaatacggacatggtgtgaagagtctactgagctagttagtagtcctccggcccctgaatgcggctaatcccaactgcggagcacacgcccacaagccagtgggtagtgtgtcgtaacgggcaactctgcagcggaaccgactactttgggtgtccgtgtttccttttattcttatgttggctgcttatggtgacaattaaagagttgttaccatatagctattggattggccatccggtgtgcaacagagcgatcgtttacctatttattggttttgtaccattgacactgaagtctgtgatcacccttaattttatcttaaccctcaacacagccaaac

SEQ ID NO: 23368 - DNA, 543 bp, synthetic construct
  source 1..543: mol_type = other DNA
actgctcacgcggttgaaggagaaaacgttcgttatccggctaactacttcggaaagcctagtaacaccatggaagttgcggagagtttcgttcagcacttccccagtgtagatcaggtcgatgagtcaccgcattccccacgggcgaccgtggcggtggctgcgttggcggcctgcccatggggtaacccatgggacgctctaatacggacatggtgtgaagagtctactgagctagttagtagtcctccggcccctgaatgcggctaatcccaactgcggagcacacgcccacaagccagtgggtagtgtgtcgtaacgggcaactctgcagcggaaccgactactttgggtgtccgtgtttccttttattcttatgttggctgcttatggtgacaattaaagagttgttaccatatagctattggattggccatccggtgtgcaacagagcgatcgtttacctatttattggttttgtaccattgacactgaagtctgtgatcacccttaattttatcttaaccctcaacacagccaaac

SEQ ID NO: 23369 - DNA, 693 bp, synthetic construct
  source 1..693: mol_type = other DNA
cactctggtaccacggtacctttgtgcgcctgttttatcatcccacccctacctgaaacgtagaagcaataatcagtcgaccaatagtgggtgtggcacaccagccacatcttggtcaagcacttctgtttccccgggttgagtatcaatatgctgttcacacggctgaaggagaaaacgcccgttatccggccaactacttcgagaagcctagtatcgccatgaacattgcaaggcgtttcgctcagcacttcccccgtgtagatcaggccgatgagtcaccgcattccccacgggcgaccgtggcggtggctgcgttggcggcctgcctgtgggttgacccacaggacgccttaatatagacatggtgtgaagagcctattgagctggttggtattcctccggcccctgaatgcggctaatcctaactgtggagcacatactcacaagccagtgggtggtgtgtcgtaatgggcaactctgcagcggaaccgactactttgggtgtccgtgtttccttttatacttatactggctgcttatggtgacaatcagagaattgttaccatatagctattggattggccatccggtgtgcaacagagctattgtgtatttatttgttggatttgtcccactatcacatacatcccttaacactttgtattttattttgaaattaaacgcaagaaa

SEQ ID NO: 23370 - DNA, 643 bp, synthetic construct
  source 1..643: mol_type = other DNA
acctgaaacgtagaagcaataatcagtcgaccaatagtgggtgtggcacaccagccacatcttggtcaagcacttctgtttccccgggttgagtatcaatatgctgttcacacggctgaaggagaaaacgcccgttatccggccaactacttcgagaagcctagtatcgccatgaacattgcaaggcgtttcgctcagcacttcccccgtgtagatcaggccgatgagtcaccgcattccccacgggcgaccgtggcggtggctgcgttggcggcctgcctgtgggttgacccacaggacgccttaatatagacatggtgtgaagagcctattgagctggttggtattcctccggcccctgaatgcggctaatcctaactgtggagcacatactcacaagccagtgggtggtgtgtcgtaatgggcaactctgcagcggaaccgactactttgggtgtccgtgtttccttttatacttatactggctgcttatggtgacaatcagagaattgttaccatatagctattggattggccatccggtgtgcaacagagctattgtgtatttatttgttggatttgtcccactatcacatacatcccttaacactttgtattttattttgaaattaaacgcaagaaa

SEQ ID NO: 23371 - DNA, 593 bp, synthetic construct
  source 1..593: mol_type = other DNA
ccagccacatcttggtcaagcacttctgtttccccgggttgagtatcaatatgctgttcacacggctgaaggagaaaacgcccgttatccggccaactacttcgagaagcctagtatcgccatgaacattgcaaggcgtttcgctcagcacttcccccgtgtagatcaggccgatgagtcaccgcattccccacgggcgaccgtggcggtggctgcgttggcggcctgcctgtgggttgacccacaggacgccttaatatagacatggtgtgaagagcctattgagctggttggtattcctccggcccctgaatgcggctaatcctaactgtggagcacatactcacaagccagtgggtggtgtgtcgtaatgggcaactctgcagcggaaccgactactttgggtgtccgtgtttccttttatacttatactggctgcttatggtgacaatcagagaattgttaccatatagctattggattggccatccggtgtgcaacagagctattgtgtatttatttgttggatttgtcccactatcacatacatcccttaacactttgtattttattttgaaattaaacgcaagaaa

SEQ ID NO: 23372 - DNA, 543 bp, synthetic construct
  source 1..543: mol_type = other DNA
atgctgttcacacggctgaaggagaaaacgcccgttatccggccaactacttcgagaagcctagtatcgccatgaacattgcaaggcgtttcgctcagcacttcccccgtgtagatcaggccgatgagtcaccgcattccccacgggcgaccgtggcggtggctgcgttggcggcctgcctgtgggttgacccacaggacgccttaatatagacatggtgtgaagagcctattgagctggttggtattcctccggcccctgaatgcggctaatcctaactgtggagcacatactcacaagccagtgggtggtgtgtcgtaatgggcaactctgcagcggaaccgactactttgggtgtccgtgtttccttttatacttatactggctgcttatggtgacaatcagagaattgttaccatatagctattggattggccatccggtgtgcaacagagctattgtgtatttatttgttggatttgtcccactatcacatacatcccttaacactttgtattttattttgaaattaaacgcaagaaa

SEQ ID NO: 23373 - DNA, 693 bp, synthetic construct
  source 1..693: mol_type = other DNA
gcactctggtactgcggtacctttgtgcgcctgttttatcaccccaccccatctggaacgtagaagcaatgcacaactgaccaatagtgggtgtggcgcaccagccacatcttggtcgagcacttctgtttccccgggtttagtatcaataagctgctcacgcggctgaaggagaaaacacccgttatccggccgactacttcgagaaacctagtaccgctatgaacgttgcaaggcgtttcgttcagcacttcccccgtgtagatcaggccgatgagtcaccgcattcctcacgggcgaccgtggcggtggctgcgttggcggcctgcctatgggcttgcccataggacgccttaatactgacatggtgcgaagagtctattgagctagttggtagtcctccggcccctgaatgcggctaatcctaactgcggagcacatactcacaaaccagtgagcggtgtgtcgtaacgggcaactctgcagcggaaccgactactttgggtgtccgtgtttccttttattcttatactggctgcttatggtgacaattaaagaattgttaccatatagctattggattggccatccggtgtctaacagagctattatatacttgtttgttggattcatctcgttatcacacaaatcccttaacactttgtgttttatcttgaatttgaactcaaaaag

SEQ ID NO: 23374 - DNA, 643 bp, synthetic construct
  source 1..643: mol_type = other DNA
atctggaacgtagaagcaatgcacaactgaccaatagtgggtgtggcgcaccagccacatcttggtcgagcacttctgtttccccgggtttagtatcaataagctgctcacgcggctgaaggagaaaacacccgttatccggccgactacttcgagaaacctagtaccgctatgaacgttgcaaggcgtttcgttcagcacttcccccgtgtagatcaggccgatgagtcaccgcattcctcacgggcgaccgtggcggtggctgcgttggcggcctgcctatgggcttgcccataggacgccttaatactgacatggtgcgaagagtctattgagctagttggtagtcctccggcccctgaatgcggctaatcctaactgcggagcacatactcacaaaccagtgagcggtgtgtcgtaacgggcaactctgcagcggaaccgactactttgggtgtccgtgtttccttttattcttatactggctgcttatggtgacaattaaagaattgttaccatatagctattggattggccatccggtgtctaacagagctattatatacttgtttgttggattcatctcgttatcacacaaatcccttaacactttgtgttttatcttgaatttgaactcaaaaag

SEQ ID NO: 23375 - DNA, 593 bp, synthetic construct
  source 1..593: mol_type = other DNA
ccagccacatcttggtcgagcacttctgtttccccgggtttagtatcaataagctgctcacgcggctgaaggagaaaacacccgttatccggccgactacttcgagaaacctagtaccgctatgaacgttgcaaggcgtttcgttcagcacttcccccgtgtagatcaggccgatgagtcaccgcattcctcacgggcgaccgtggcggtggctgcgttggcggcctgcctatgggcttgcccataggacgccttaatactgacatggtgcgaagagtctattgagctagttggtagtcctccggcccctgaatgcggctaatcctaactgcggagcacatactcacaaaccagtgagcggtgtgtcgtaacgggcaactctgcagcggaaccgactactttgggtgtccgtgtttccttttattcttatactggctgcttatggtgacaattaaagaattgttaccatatagctattggattggccatccggtgtctaacagagctattatatacttgtttgttggattcatctcgttatcacacaaatcccttaacactttgtgttttatcttgaatttgaactcaaaaag

SEQ ID NO: 23376 - DNA, 543 bp, synthetic construct
  source 1..543: mol_type = other DNA
aagctgctcacgcggctgaaggagaaaacacccgttatccggccgactacttcgagaaacctagtaccgctatgaacgttgcaaggcgtttcgttcagcacttcccccgtgtagatcaggccgatgagtcaccgcattcctcacgggcgaccgtggcggtggctgcgttggcggcctgcctatgggcttgcccataggacgccttaatactgacatggtgcgaagagtctattgagctagttggtagtcctccggcccctgaatgcggctaatcctaactgcggagcacatactcacaaaccagtgagcggtgtgtcgtaacgggcaactctgcagcggaaccgactactttgggtgtccgtgtttccttttattcttatactggctgcttatggtgacaattaaagaattgttaccatatagctattggattggccatccggtgtctaacagagctattatatacttgtttgttggattcatctcgttatcacacaaatcccttaacactttgtgttttatcttgaatttgaactcaaaaag

SEQ ID NO: 23377 - DNA, 693 bp, synthetic construct
  source 1..693: mol_type = other DNA
gcactctggtactatggtacctttgtgcgcctgttttatattcctcccccaaattgcaacttagaagacatgcactccgatcaatagcaggcgtggcgcaccagctgcgtcttgatcaagcatttctgtttccccggactgagtatcaatagactgctcacgcggttgagggagaaaacgtccgttacccggccaactacttcgagaagcctagtaacactatgaaagttgcggggcgtttcgctcagcactcccccagtgtagatcaggtcgatgagtcaccgcattccccacgggcgaccgtggcggtggctgcgttggcggcctgcctatggggcaacccatgggacgctctaatatggacatggtgtgaagagcttattgagctagttggtagtcctccggcccctgaatgcggctaatcctaactgcggagcacgtgcctccaaaccagaaggtggcgtgtcgtaatgggcaactctgcagcggaaccgactactttgggtgtccgtgtttccttttattcttactctggctgcttatggtgacaattgacagattgttaccatatagctattggattggccatccggtgacgaacagagcgattgtgtaccagtttattggtttcgtccacttgaatacacgtgaattcaataccttgctgttggtattgaatttcaatacaacaaa

SEQ ID NO: 23378 - DNA, 643 bp, synthetic construct
  source 1..643: mol_type = other DNA
aaattgcaacttagaagacatgcactccgatcaatagcaggcgtggcgcaccagctgcgtcttgatcaagcatttctgtttccccggactgagtatcaatagactgctcacgcggttgagggagaaaacgtccgttacccggccaactacttcgagaagcctagtaacactatgaaagttgcggggcgtttcgctcagcactcccccagtgtagatcaggtcgatgagtcaccgcattccccacgggcgaccgtggcggtggctgcgttggcggcctgcctatggggcaacccatgggacgctctaatatggacatggtgtgaagagcttattgagctagttggtagtcctccggcccctgaatgcggctaatcctaactgcggagcacgtgcctccaaaccagaaggtggcgtgtcgtaatgggcaactctgcagcggaaccgactactttgggtgtccgtgtttccttttattcttactctggctgcttatggtgacaattgacagattgttaccatatagctattggattggccatccggtgacgaacagagcgattgtgtaccagtttattggtttcgtccacttgaatacacgtgaattcaataccttgctgttggtattgaatttcaatacaacaaa

SEQ ID NO: 23379 - DNA, 593 bp, synthetic construct
  source 1..593: mol_type = other DNA
ccagctgcgtcttgatcaagcatttctgtttccccggactgagtatcaatagactgctcacgcggttgagggagaaaacgtccgttacccggccaactacttcgagaagcctagtaacactatgaaagttgcggggcgtttcgctcagcactcccccagtgtagatcaggtcgatgagtcaccgcattccccacgggcgaccgtggcggtggctgcgttggcggcctgcctatggggcaacccatgggacgctctaatatggacatggtgtgaagagcttattgagctagttggtagtcctccggcccctgaatgcggctaatcctaactgcggagcacgtgcctccaaaccagaaggtggcgtgtcgtaatgggcaactctgcagcggaaccgactactttgggtgtccgtgtttccttttattcttactctggctgcttatggtgacaattgacagattgttaccatatagctattggattggccatccggtgacgaacagagcgattgtgtaccagtttattggtttcgtccacttgaatacacgtgaattcaataccttgctgttggtattgaatttcaatacaacaaa

SEQ ID NO: 23380 - DNA, 543 bp, synthetic construct
  source 1..543: mol_type = other DNA
agactgctcacgcggttgagggagaaaacgtccgttacccggccaactacttcgagaagcctagtaacactatgaaagttgcggggcgtttcgctcagcactcccccagtgtagatcaggtcgatgagtcaccgcattccccacgggcgaccgtggcggtggctgcgttggcggcctgcctatggggcaacccatgggacgctctaatatggacatggtgtgaagagcttattgagctagttggtagtcctccggcccctgaatgcggctaatcctaactgcggagcacgtgcctccaaaccagaaggtggcgtgtcgtaatgggcaactctgcagcggaaccgactactttgggtgtccgtgtttccttttattcttactctggctgcttatggtgacaattgacagattgttaccatatagctattggattggccatccggtgacgaacagagcgattgtgtaccagtttattggtttcgtccacttgaatacacgtgaattcaataccttgctgttggtattgaatttcaatacaacaaa

SEQ ID NO: 23381 - DNA, 693 bp, synthetic construct
  source 1..693: mol_type = other DNA
cactctggtaccgaggtacctttgtgcgcctgttttatttccccttcccctgatgcaacttagaagctccgaactaatgatcaatagtaggtgtggcacgccagccacatcttgatcaagcacttctgtttacccggaccgagtatcaataagctgcgcaagcggctgaaggagaaagcgttcgttatccggccaactacttcgagaagcttagtaccaccatgaacgttgcagagtgtttcgttcagcacaaccccggtgtagatcaggccgatgagtcaccgcgttccccatgggcgaccatggcggtggctgcgttggcggcctgcccatggagcaatccatgggacgctctaatactgacatggtgcgaagagcctattgagctagttggtgatcctccggcccctgaatgcggctaatcctaactgcggagcatgcgcccacaagccagtgggtggtgtgtcgtaacgggtaactctgcagcggaaccgactactttgggtgtccgtgtttccttttatctttacattggctgcttatggtgacaattgaagaattgttaccatatagctattggattggccatccggtgtgcaatagagcgattatatacctatttgttggatttgttccattgacatatagatctcttaacactctacaacacatcttgatcttgaacacgagaaa

SEQ ID NO: 23382 - DNA, 643 bp, synthetic construct
  source 1..643: mol_type = other DNA
tgatgcaacttagaagctccgaactaatgatcaatagtaggtgtggcacgccagccacatcttgatcaagcacttctgtttacccggaccgagtatcaataagctgcgcaagcggctgaaggagaaagcgttcgttatccggccaactacttcgagaagcttagtaccaccatgaacgttgcagagtgtttcgttcagcacaaccccggtgtagatcaggccgatgagtcaccgcgttccccatgggcgaccatggcggtggctgcgttggcggcctgcccatggagcaatccatgggacgctctaatactgacatggtgcgaagagcctattgagctagttggtgatcctccggcccctgaatgcggctaatcctaactgcggagcatgcgcccacaagccagtgggtggtgtgtcgtaacgggtaactctgcagcggaaccgactactttgggtgtccgtgtttccttttatctttacattggctgcttatggtgacaattgaagaattgttaccatatagctattggattggccatccggtgtgcaatagagcgattatatacctatttgttggatttgttccattgacatatagatctcttaacactctacaacacatcttgatcttgaacacgagaaa

SEQ ID NO: 23383 - DNA, 593 bp, synthetic construct
  source 1..593: mol_type = other DNA
ccagccacatcttgatcaagcacttctgtttacccggaccgagtatcaataagctgcgcaagcggctgaaggagaaagcgttcgttatccggccaactacttcgagaagcttagtaccaccatgaacgttgcagagtgtttcgttcagcacaaccccggtgtagatcaggccgatgagtcaccgcgttccccatgggcgaccatggcggtggctgcgttggcggcctgcccatggagcaatccatgggacgctctaatactgacatggtgcgaagagcctattgagctagttggtgatcctccggcccctgaatgcggctaatcctaactgcggagcatgcgcccacaagccagtgggtggtgtgtcgtaacgggtaactctgcagcggaaccgactactttgggtgtccgtgtttccttttatctttacattggctgcttatggtgacaattgaagaattgttaccatatagctattggattggccatccggtgtgcaatagagcgattatatacctatttgttggatttgttccattgacatatagatctcttaacactctacaacacatcttgatcttgaacacgagaaa

SEQ ID NO: 23384 - DNA, 543 bp, synthetic construct
  source 1..543: mol_type = other DNA
aagctgcgcaagcggctgaaggagaaagcgttcgttatccggccaactacttcgagaagcttagtaccaccatgaacgttgcagagtgtttcgttcagcacaaccccggtgtagatcaggccgatgagtcaccgcgttccccatgggcgaccatggcggtggctgcgttggcggcctgcccatggagcaatccatgggacgctctaatactgacatggtgcgaagagcctattgagctagttggtgatcctccggcccctgaatgcggctaatcctaactgcggagcatgcgcccacaagccagtgggtggtgtgtcgtaacgggtaactctgcagcggaaccgactactttgggtgtccgtgtttccttttatctttacattggctgcttatggtgacaattgaagaattgttaccatatagctattggattggccatccggtgtgcaatagagcgattatatacctatttgttggatttgttccattgacatatagatctcttaacactctacaacacatcttgatcttgaacacgagaaa

SEQ ID NO: 23385 - DNA, 693 bp, synthetic construct
  source 1..693: mol_type = other DNA
cactctgattctacggaatctttgtgcgcctgttttacaaccccctccccctatgtaacttagaagcaatgcaccaatgatcaacagcaggcgtggcgcaccagccatgtcttgatcaagcacttctgtttccccggacagagtatcaatagactgctcgcgtggtcgaaggagaaaacgtccgttacccggctaactacttcgagaaacctagtagcaccaatgaagctgcagagcgtttcgctcagcacttaccccgtgtagatcaggccgatgagtcactgcgttccccacgggcgaccgtggcagtggctgcgttggcggcctgcctatggggtcacccataggacgctctaatgtggacatggtgcgaagagtctattgagctagttagtagtcctccggcccctgaatgcggctaatcctaactgcggagcgcataccctcaaaccagggggtggtgcgtcgtaacgggtaactctgcagcggaaccgactactttgggtgtccgtgtttccttttattttcttaatggctgcttatggtgacaattgaggaattgttaccatatagctattggattggccatcaggtgtgtaacagagcaattatctacttgtttgtaggatataccccattaacgttcaaatctcttaacacactacagtacatactaactttgaacacaagaaa

SEQ ID NO: 23386 - DNA, 643 bp, synthetic construct
  source 1..643: mol_type = other DNA
ctatgtaacttagaagcaatgcaccaatgatcaacagcaggcgtggcgcaccagccatgtcttgatcaagcacttctgtttccccggacagagtatcaatagactgctcgcgtggtcgaaggagaaaacgtccgttacccggctaactacttcgagaaacctagtagcaccaatgaagctgcagagcgtttcgctcagcacttaccccgtgtagatcaggccgatgagtcactgcgttccccacgggcgaccgtggcagtggctgcgttggcggcctgcctatggggtcacccataggacgctctaatgtggacatggtgcgaagagtctattgagctagttagtagtcctccggcccctgaatgcggctaatcctaactgcggagcgcataccctcaaaccagggggtggtgcgtcgtaacgggtaactctgcagcggaaccgactactttgggtgtccgtgtttccttttattttcttaatggctgcttatggtgacaattgaggaattgttaccatatagctattggattggccatcaggtgtgtaacagagcaattatctacttgtttgtaggatataccccattaacgttcaaatctcttaacacactacagtacatactaactttgaacacaagaaa

SEQ ID NO: 23387 - DNA, 593 bp, synthetic construct
  source 1..593: mol_type = other DNA
ccagccatgtcttgatcaagcacttctgtttccccggacagagtatcaatagactgctcgcgtggtcgaaggagaaaacgtccgttacccggctaactacttcgagaaacctagtagcaccaatgaagctgcagagcgtttcgctcagcacttaccccgtgtagatcaggccgatgagtcactgcgttccccacgggcgaccgtggcagtggctgcgttggcggcctgcctatggggtcacccataggacgctctaatgtggacatggtgcgaagagtctattgagctagttagtagtcctccggcccctgaatgcggctaatcctaactgcggagcgcataccctcaaaccagggggtggtgcgtcgtaacgggtaactctgcagcggaaccgactactttgggtgtccgtgtttccttttattttcttaatggctgcttatggtgacaattgaggaattgttaccatatagctattggattggccatcaggtgtgtaacagagcaattatctacttgtttgtaggatataccccattaacgttcaaatctcttaacacactacagtacatactaactttgaacacaagaaa

SEQ ID NO: 23388 - DNA, 543 bp, synthetic construct
  source 1..543: mol_type = other DNA
agactgctcgcgtggtcgaaggagaaaacgtccgttacccggctaactacttcgagaaacctagtagcaccaatgaagctgcagagcgtttcgctcagcacttaccccgtgtagatcaggccgatgagtcactgcgttccccacgggcgaccgtggcagtggctgcgttggcggcctgcctatggggtcacccataggacgctctaatgtggacatggtgcgaagagtctattgagctagttagtagtcctccggcccctgaatgcggctaatcctaactgcggagcgcataccctcaaaccagggggtggtgcgtcgtaacgggtaactctgcagcggaaccgactactttgggtgtccgtgtttccttttattttcttaatggctgcttatggtgacaattgaggaattgttaccatatagctattggattggccatcaggtgtgtaacagagcaattatctacttgtttgtaggatataccccattaacgttcaaatctcttaacacactacagtacatactaactttgaacacaagaaa

SEQ ID NO: 23389 - DNA, 693 bp, synthetic construct
  source 1..693: mol_type = other DNA
cactctggtaatacgttacctttgtgcgcctgttttacctccccctaccctggaacactttagaagtaaagcatatctggtcaatagaaggtgtggcgaaccagctgcatctcgaccaagcacttctgtttccccggactgagtatcaatagactgctaacgcggtcgaaggagaaaacgttcgttatccggctagctacttcgagaagcctagtaacaccatgaaagttgcagagtgtttcactcagcacttcccccgtgtagatcaggtcgatgagtcaccgcgacccccacgggcgaccgtggcggtggctgcgttggcggcctgcctgtggggcaacccataggacgctctaatacagacatggtgtgaagagcctattgagctagctagtagtcctccggcccctgaatgcggctaatcctaactgcggagcacatgctcgtgaaccagcgagtagtgtgtcgtaatgggtaactctgcagcggaaccgactactttgggtgtccgtgtttctttttattcttacattggctgcttatggtgacaattaaagaattggcaccatatagctattggattggccatcctgtgactaacagagctattatatatctctttgttggatttgttcccttgaggctcactacttataacacactttgttttatattgactctcaattcagcaaa

SEQ ID NO: 23390 - DNA, 643 bp, synthetic construct
  source 1..643: mol_type = other DNA
tggaacactttagaagtaaagcatatctggtcaatagaaggtgtggcgaaccagctgcatctcgaccaagcacttctgtttccccggactgagtatcaatagactgctaacgcggtcgaaggagaaaacgttcgttatccggctagctacttcgagaagcctagtaacaccatgaaagttgcagagtgtttcactcagcacttcccccgtgtagatcaggtcgatgagtcaccgcgacccccacgggcgaccgtggcggtggctgcgttggcggcctgcctgtggggcaacccataggacgctctaatacagacatggtgtgaagagcctattgagctagctagtagtcctccggcccctgaatgcggctaatcctaactgcggagcacatgctcgtgaaccagcgagtagtgtgtcgtaatgggtaactctgcagcggaaccgactactttgggtgtccgtgtttctttttattcttacattggctgcttatggtgacaattaaagaattggcaccatatagctattggattggccatcctgtgactaacagagctattatatatctctttgttggatttgttcccttgaggctcactacttataacacactttgttttatattgactctcaattcagcaaa

SEQ ID NO: 23391 - DNA, 593 bp, synthetic construct
  source 1..593: mol_type = other DNA
ccagctgcatctcgaccaagcacttctgtttccccggactgagtatcaatagactgctaacgcggtcgaaggagaaaacgttcgttatccggctagctacttcgagaagcctagtaacaccatgaaagttgcagagtgtttcactcagcacttcccccgtgtagatcaggtcgatgagtcaccgcgacccccacgggcgaccgtggcggtggctgcgttggcggcctgcctgtggggcaacccataggacgctctaatacagacatggtgtgaagagcctattgagctagctagtagtcctccggcccctgaatgcggctaatcctaactgcggagcacatgctcgtgaaccagcgagtagtgtgtcgtaatgggtaactctgcagcggaaccgactactttgggtgtccgtgtttctttttattcttacattggctgcttatggtgacaattaaagaattggcaccatatagctattggattggccatcctgtgactaacagagctattatatatctctttgttggatttgttcccttgaggctcactacttataacacactttgttttatattgactctcaattcagcaaa

SEQ ID NO: 23392 - DNA, 543 bp, synthetic construct
  source 1..543: mol_type = other DNA
agactgctaacgcggtcgaaggagaaaacgttcgttatccggctagctacttcgagaagcctagtaacaccatgaaagttgcagagtgtttcactcagcacttcccccgtgtagatcaggtcgatgagtcaccgcgacccccacgggcgaccgtggcggtggctgcgttggcggcctgcctgtggggcaacccataggacgctctaatacagacatggtgtgaagagcctattgagctagctagtagtcctccggcccctgaatgcggctaatcctaactgcggagcacatgctcgtgaaccagcgagtagtgtgtcgtaatgggtaactctgcagcggaaccgactactttgggtgtccgtgtttctttttattcttacattggctgcttatggtgacaattaaagaattggcaccatatagctattggattggccatcctgtgactaacagagctattatatatctctttgttggatttgttcccttgaggctcactacttataacacactttgttttatattgactctcaattcagcaaa

SEQ ID NO: 23393 - DNA, 693 bp, synthetic construct
  source 1..693: mol_type = other DNA
cactctggtatcacgatacctttgtgcgcctgttttatatcccttccccattaatgtaacatagaagttatgcaccccgatcaatagcaggcatggcgctccagctatgtcttgatcaagcacttctgtttccccggactgagtatcaatagactgcttgcgcggttgaaggagaaaacgttcgttatccggctaactacttcgggaagcttagtaatgccatggaagttgcggagagtttcgctcagcacttccccagtgtagatcaggctgatgagtcaccgcattccccacgggtgaccgtggcggtggctgcgttggcggcctgcccatagggagacctatgggacgctctaatacggacatggtgtgaagagcctactgagctagttagcagtcctccggcccctgaatgcggctaatcctaactgcggagcacgcgtctccaatccaggggatagcgtgtcgtaatgggcaactctgcagcggaaccgactactttgggtgtccgtgtttccttttattcttacactggctgcttatggtgacaattgaggaattgttaccatatagctattggattggccatccggtgactaacagagctattatttaccaatttgttggatttgtacctctttcactcaccgtttaccacacccttctatacctattacaactgaatagtagaag

SEQ ID NO: 23394 - DNA, 643 bp, synthetic construct
  source 1..643: mol_type = other DNA
ttaatgtaacatagaagttatgcaccccgatcaatagcaggcatggcgctccagctatgtcttgatcaagcacttctgtttccccggactgagtatcaatagactgcttgcgcggttgaaggagaaaacgttcgttatccggctaactacttcgggaagcttagtaatgccatggaagttgcggagagtttcgctcagcacttccccagtgtagatcaggctgatgagtcaccgcattccccacgggtgaccgtggcggtggctgcgttggcggcctgcccatagggagacctatgggacgctctaatacggacatggtgtgaagagcctactgagctagttagcagtcctccggcccctgaatgcggctaatcctaactgcggagcacgcgtctccaatccaggggatagcgtgtcgtaatgggcaactctgcagcggaaccgactactttgggtgtccgtgtttccttttattcttacactggctgcttatggtgacaattgaggaattgttaccatatagctattggattggccatccggtgactaacagagctattatttaccaatttgttggatttgtacctctttcactcaccgtttaccacacccttctatacctattacaactgaatagtagaag

SEQ ID NO: 23395 - DNA, 593 bp, synthetic construct
  source 1..593: mol_type = other DNA
ccagctatgtcttgatcaagcacttctgtttccccggactgagtatcaatagactgcttgcgcggttgaaggagaaaacgttcgttatccggctaactacttcgggaagcttagtaatgccatggaagttgcggagagtttcgctcagcacttccccagtgtagatcaggctgatgagtcaccgcattccccacgggtgaccgtggcggtggctgcgttggcggcctgcccatagggagacctatgggacgctctaatacggacatggtgtgaagagcctactgagctagttagcagtcctccggcccctgaatgcggctaatcctaactgcggagcacgcgtctccaatccaggggatagcgtgtcgtaatgggcaactctgcagcggaaccgactactttgggtgtccgtgtttccttttattcttacactggctgcttatggtgacaattgaggaattgttaccatatagctattggattggccatccggtgactaacagagctattatttaccaatttgttggatttgtacctctttcactcaccgtttaccacacccttctatacctattacaactgaatagtagaag

SEQ ID NO: 23396 - DNA, 543 bp, synthetic construct
  source 1..543: mol_type = other DNA
agactgcttgcgcggttgaaggagaaaacgttcgttatccggctaactacttcgggaagcttagtaatgccatggaagttgcggagagtttcgctcagcacttccccagtgtagatcaggctgatgagtcaccgcattccccacgggtgaccgtggcggtggctgcgttggcggcctgcccatagggagacctatgggacgctctaatacggacatggtgtgaagagcctactgagctagttagcagtcctccggcccctgaatgcggctaatcctaactgcggagcacgcgtctccaatccaggggatagcgtgtcgtaatgggcaactctgcagcggaaccgactactttgggtgtccgtgtttccttttattcttacactggctgcttatggtgacaattgaggaattgttaccatatagctattggattggccatccggtgactaacagagctattatttaccaatttgttggatttgtacctctttcactcaccgtttaccacacccttctatacctattacaactgaatagtagaag

SEQ ID NO: 23397 - DNA, 693 bp, synthetic construct
  source 1..693: mol_type = other DNA
gtactctggtattacggtacctttgtacgcctgttttatactccctccccatgtaactttagaagcaattcaataagttcaatagagggggtacaaaccagtaccaccacgaacaagcacttctgtctccccggtgatcttgcatagactgttcccacggttgaaagcgagtgatccgttatccgcttgagtacttcgagaagcctagtaccaccttggaatcttcgatgcgttgcgctcagcactctgccccgagtgtagcttaggctgatgagtctgggctttccccaccggcgacggtggcccaggctgcgttggcggcctacccgtggtcaacaccacgggacgctagttgtgaacaaggtgtgaagagcctattgagctactcaagagtcctccggcccctgaatgcggctaatcctaaccatggagcaggtactctcaacccagagggcagcctgtcgtaacgcgtgagtccgtggcggaaccgactactttgggtgaccgtgtttccttttatttttgactggctgcttatggtgacaatcatagattgttatcatagagcgaattggattggccatccagtgaaatataaacacgttatctacttgtttgttggatttactccactcactcagtttacccctagcataataatagcagtactactgataaggaattattgccacc

SEQ ID NO: 23398 - DNA, 643 bp, synthetic construct
  source 1..643: mol_type = other DNA
atgtaactttagaagcaattcaataagttcaatagagggggtacaaaccagtaccaccacgaacaagcacttctgtctccccggtgatcttgcatagactgttcccacggttgaaagcgagtgatccgttatccgcttgagtacttcgagaagcctagtaccaccttggaatcttcgatgcgttgcgctcagcactctgccccgagtgtagcttaggctgatgagtctgggctttccccaccggcgacggtggcccaggctgcgttggcggcctacccgtggtcaacaccacgggacgctagttgtgaacaaggtgtgaagagcctattgagctactcaagagtcctccggcccctgaatgcggctaatcctaaccatggagcaggtactctcaacccagagggcagcctgtcgtaacgcgtgagtccgtggcggaaccgactactttgggtgaccgtgtttccttttatttttgactggctgcttatggtgacaatcatagattgttatcatagagcgaattggattggccatccagtgaaatataaacacgttatctacttgtttgttggatttactccactcactcagtttacccctagcataataatagcagtactactgataaggaattattgccacc

SEQ ID NO: 23399 - DNA, 593 bp, synthetic construct
  source 1..593: mol_type = other DNA
gtaccaccacgaacaagcacttctgtctccccggtgatcttgcatagactgttcccacggttgaaagcgagtgatccgttatccgcttgagtacttcgagaagcctagtaccaccttggaatcttcgatgcgttgcgctcagcactctgccccgagtgtagcttaggctgatgagtctgggctttccccaccggcgacggtggcccaggctgcgttggcggcctacccgtggtcaacaccacgggacgctagttgtgaacaaggtgtgaagagcctattgagctactcaagagtcctccggcccctgaatgcggctaatcctaaccatggagcaggtactctcaacccagagggcagcctgtcgtaacgcgtgagtccgtggcggaaccgactactttgggtgaccgtgtttccttttatttttgactggctgcttatggtgacaatcatagattgttatcatagagcgaattggattggccatccagtgaaatataaacacgttatctacttgtttgttggatttactccactcactcagtttacccctagcataataatagcagtactactgataaggaattattgccacc

SEQ ID NO: 23400 - DNA, 543 bp, synthetic construct
  source 1..543: mol_type = other DNA
gttcccacggttgaaagcgagtgatccgttatccgcttgagtacttcgagaagcctagtaccaccttggaatcttcgatgcgttgcgctcagcactctgccccgagtgtagcttaggctgatgagtctgggctttccccaccggcgacggtggcccaggctgcgttggcggcctacccgtggtcaacaccacgggacgctagttgtgaacaaggtgtgaagagcctattgagctactcaagagtcctccggcccctgaatgcggctaatcctaaccatggagcaggtactctcaacccagagggcagcctgtcgtaacgcgtgagtccgtggcggaaccgactactttgggtgaccgtgtttccttttatttttgactggctgcttatggtgacaatcatagattgttatcatagagcgaattggattggccatccagtgaaatataaacacgttatctacttgtttgttggatttactccactcactcagtttacccctagcataataatagcagtactactgataaggaattattgccacc

SEQ ID NO: 23401 - DNA, 693 bp, synthetic construct
  source 1..693: mol_type = other DNA
gtactctggtatcacggtacctttgtacgcctgttttatactcccttcccgcaacttagacgcataaaaaccaagttcaatagaagggggtacaagccagtaccaccacgaacaagcacttctgtttccccggtgatgttgtatagactgctcgcgtggttgaaagcgacagatccgttatccgcttgtgtacttcgagaagcccagtaccaccttggaatcttcgatgcgttgcgctcagcactcaaccccagagtgtagcttaggctgatgagtctggacatcccccaccggtgacggtggtccaggctgcgttggcggcctacccatggctaacgccatgggacgctagttgtgaacagggtgtgaagagcctattgagctacataagagtcctccggcccctgaatgcggctaatcccaacctcggagcaggtggtcacataccagtgactggcctgtcgtaacgcgcaagtccgtggcggaaccgactactttgggtgtccgtgtttccttttattttataatggctgcttatggtgacaatcacagattgtcgtcataaagcgaattggattggccatccggtgatagtgaaattcattacttaactgtttactggattcgctccaccgcaagtgtttgctctgagtacaatttcaatagttactttaagtagacaattgtattaca

SEQ ID NO: 23402 - DNA, 643 bp, synthetic construct
  source 1..643: mol_type = other DNA
gcaacttagacgcataaaaaccaagttcaatagaagggggtacaagccagtaccaccacgaacaagcacttctgtttccccggtgatgttgtatagactgctcgcgtggttgaaagcgacagatccgttatccgcttgtgtacttcgagaagcccagtaccaccttggaatcttcgatgcgttgcgctcagcactcaaccccagagtgtagcttaggctgatgagtctggacatcccccaccggtgacggtggtccaggctgcgttggcggcctacccatggctaacgccatgggacgctagttgtgaacagggtgtgaagagcctattgagctacataagagtcctccggcccctgaatgcggctaatcccaacctcggagcaggtggtcacataccagtgactggcctgtcgtaacgcgcaagtccgtggcggaaccgactactttgggtgtccgtgtttccttttattttataatggctgcttatggtgacaatcacagattgtcgtcataaagcgaattggattggccatccggtgatagtgaaattcattacttaactgtttactggattcgctccaccgcaagtgtttgctctgagtacaatttcaatagttactttaagtagacaattgtattaca

SEQ ID NO: 23403 - DNA, 593 bp, synthetic construct
  source 1..593: mol_type = other DNA
taccaccacgaacaagcacttctgtttccccggtgatgttgtatagactgctcgcgtggttgaaagcgacagatccgttatccgcttgtgtacttcgagaagcccagtaccaccttggaatcttcgatgcgttgcgctcagcactcaaccccagagtgtagcttaggctgatgagtctggacatcccccaccggtgacggtggtccaggctgcgttggcggcctacccatggctaacgccatgggacgctagttgtgaacagggtgtgaagagcctattgagctacataagagtcctccggcccctgaatgcggctaatcccaacctcggagcaggtggtcacataccagtgactggcctgtcgtaacgcgcaagtccgtggcggaaccgactactttgggtgtccgtgtttccttttattttataatggctgcttatggtgacaatcacagattgtcgtcataaagcgaattggattggccatccggtgatagtgaaattcattacttaactgtttactggattcgctccaccgcaagtgtttgctctgagtacaatttcaatagttactttaagtagacaattgtattaca

SEQ ID NO: 23404 - DNA, 543 bp, synthetic construct
  source 1..543: mol_type = other DNA
ctcgcgtggttgaaagcgacagatccgttatccgcttgtgtacttcgagaagcccagtaccaccttggaatcttcgatgcgttgcgctcagcactcaaccccagagtgtagcttaggctgatgagtctggacatcccccaccggtgacggtggtccaggctgcgttggcggcctacccatggctaacgccatgggacgctagttgtgaacagggtgtgaagagcctattgagctacataagagtcctccggcccctgaatgcggctaatcccaacctcggagcaggtggtcacataccagtgactggcctgtcgtaacgcgcaagtccgtggcggaaccgactactttgggtgtccgtgtttccttttattttataatggctgcttatggtgacaatcacagattgtcgtcataaagcgaattggattggccatccggtgatagtgaaattcattacttaactgtttactggattcgctccaccgcaagtgtttgctctgagtacaatttcaatagttactttaagtagacaattgtattaca

SEQ ID NO: 23405 - DNA, 693 bp, synthetic construct
  source 1..693: mol_type = other DNA
cactctggtattacggtacccttgtgcgcctgttttatataccccgccccaagcaaacgctagatgtaacgcacttatgatcaatagcaggcgtggcactccagccacgttatgatcaagcacttctgtctccccggaccgagtatcaatagactgctcacgcggtcgaaggagaaaacgttcgttacccgaccagctacttcgagaaacctagtaactccatggaggttgcagagtgtttcgttcagcacttcccccgtgtagatcaggctgatgagtcaccgcgttcctcacgggcgaccgtggcggtggctgcgttggcggcctgcctatgggtatacccataggacgctctaatactgacatggtgcgaagagtctattgagctagttggtagtcctccggcccctgaatgcggctaatcctaactgcggagcacatacccccaacccagggggcagtgtgtcgtaacgggtaactctgcagcggaaccgactactttgggtgtccgtgtttccttttattcttacattggctgcttatggtgacaattgagagattgttaccatatagctattggattggccatccagtgactaacagagctattatttacctttttgttggcttcgtatcacttggtttaaaagaggttagtactttatattgcattatattactaaacacgagaaa

SEQ ID NO: 23406 - DNA, 643 bp, synthetic construct
  source 1..643: mol_type = other DNA
aagcaaacgctagatgtaacgcacttatgatcaatagcaggcgtggcactccagccacgttatgatcaagcacttctgtctccccggaccgagtatcaatagactgctcacgcggtcgaaggagaaaacgttcgttacccgaccagctacttcgagaaacctagtaactccatggaggttgcagagtgtttcgttcagcacttcccccgtgtagatcaggctgatgagtcaccgcgttcctcacgggcgaccgtggcggtggctgcgttggcggcctgcctatgggtatacccataggacgctctaatactgacatggtgcgaagagtctattgagctagttggtagtcctccggcccctgaatgcggctaatcctaactgcggagcacatacccccaacccagggggcagtgtgtcgtaacgggtaactctgcagcggaaccgactactttgggtgtccgtgtttccttttattcttacattggctgcttatggtgacaattgagagattgttaccatatagctattggattggccatccagtgactaacagagctattatttacctttttgttggcttcgtatcacttggtttaaaagaggttagtactttatattgcattatattactaaacacgagaaa

SEQ ID NO: 23407 - DNA, 593 bp, synthetic construct
  source 1..593: mol_type = other DNA
ccagccacgttatgatcaagcacttctgtctccccggaccgagtatcaatagactgctcacgcggtcgaaggagaaaacgttcgttacccgaccagctacttcgagaaacctagtaactccatggaggttgcagagtgtttcgttcagcacttcccccgtgtagatcaggctgatgagtcaccgcgttcctcacgggcgaccgtggcggtggctgcgttggcggcctgcctatgggtatacccataggacgctctaatactgacatggtgcgaagagtctattgagctagttggtagtcctccggcccctgaatgcggctaatcctaactgcggagcacatacccccaacccagggggcagtgtgtcgtaacgggtaactctgcagcggaaccgactactttgggtgtccgtgtttccttttattcttacattggctgcttatggtgacaattgagagattgttaccatatagctattggattggccatccagtgactaacagagctattatttacctttttgttggcttcgtatcacttggtttaaaagaggttagtactttatattgcattatattactaaacacgagaaa

SEQ ID NO: 23408 - DNA, 543 bp, synthetic construct
  source 1..543: mol_type = other DNA
agactgctcacgcggtcgaaggagaaaacgttcgttacccgaccagctacttcgagaaacctagtaactccatggaggttgcagagtgtttcgttcagcacttcccccgtgtagatcaggctgatgagtcaccgcgttcctcacgggcgaccgtggcggtggctgcgttggcggcctgcctatgggtatacccataggacgctctaatactgacatggtgcgaagagtctattgagctagttggtagtcctccggcccctgaatgcggctaatcctaactgcggagcacatacccccaacccagggggcagtgtgtcgtaacgggtaactctgcagcggaaccgactactttgggtgtccgtgtttccttttattcttacattggctgcttatggtgacaattgagagattgttaccatatagctattggattggccatccagtgactaacagagctattatttacctttttgttggcttcgtatcacttggtttaaaagaggttagtactttatattgcattatattactaaacacgagaaa

SEQ ID NO: 23409 - DNA, 693 bp, synthetic construct
  source 1..693: mol_type = other DNA
cactctggtatcgcggtacccttgtgcgcctgttttatccgccctttcccaaacgtaacttagaagctcaacttgaatggtcagcaggaaacccagtacgccaactgggtcacgaccaagcacttctgtaaccccgggccgagtatcaataagctgctcacgcggttgaaggagaaaacgcccgttacccggccaattacttcgagaaacctagtaccaccatggaggttgcgtagtgtttcgctccgcacaaccccagtgtagatcaggccgatgagtcaccgcgttccccacgggcgaccgtggcggtggctgcgttggcggcctgcccatgggataacccatgggacgcttcaatactgacatggtgcgaagagtctattgagctaattggtagtcctccggcccctgaatgcggctaatcccaactgcggagcagatacccacatgccagtgggcagtctgtcgtaacgggcaactctgcagcggaaccgactactttgggtgtccgtgtttccttttattcatacattggctgcttatggtgacaattgaaagattgttaccatatagctattggattggccatccggtgtctaatagagcgattgtctacttgttcattgggtttgtacctttaaaccttaaagttcttaacactctcaaccttgtgctacaactcaacacggcaaa

SEQ ID NO: 23410 - DNA, 643 bp, synthetic construct
  source 1..643: mol_type = other DNA
aaacgtaacttagaagctcaacttgaatggtcagcaggaaacccagtacgccaactgggtcacgaccaagcacttctgtaaccccgggccgagtatcaataagctgctcacgcggttgaaggagaaaacgcccgttacccggccaattacttcgagaaacctagtaccaccatggaggttgcgtagtgtttcgctccgcacaaccccagtgtagatcaggccgatgagtcaccgcgttccccacgggcgaccgtggcggtggctgcgttggcggcctgcccatgggataacccatgggacgcttcaatactgacatggtgcgaagagtctattgagctaattggtagtcctccggcccctgaatgcggctaatcccaactgcggagcagatacccacatgccagtgggcagtctgtcgtaacgggcaactctgcagcggaaccgactactttgggtgtccgtgtttccttttattcatacattggctgcttatggtgacaattgaaagattgttaccatatagctattggattggccatccggtgtctaatagagcgattgtctacttgttcattgggtttgtacctttaaaccttaaagttcttaacactctcaaccttgtgctacaactcaacacggcaaa

SEQ ID NO: 23411 - DNA, 593 bp, synthetic construct
  source 1..593: mol_type = other DNA
ccaactgggtcacgaccaagcacttctgtaaccccgggccgagtatcaataagctgctcacgcggttgaaggagaaaacgcccgttacccggccaattacttcgagaaacctagtaccaccatggaggttgcgtagtgtttcgctccgcacaaccccagtgtagatcaggccgatgagtcaccgcgttccccacgggcgaccgtggcggtggctgcgttggcggcctgcccatgggataacccatgggacgcttcaatactgacatggtgcgaagagtctattgagctaattggtagtcctccggcccctgaatgcggctaatcccaactgcggagcagatacccacatgccagtgggcagtctgtcgtaacgggcaactctgcagcggaaccgactactttgggtgtccgtgtttccttttattcatacattggctgcttatggtgacaattgaaagattgttaccatatagctattggattggccatccggtgtctaatagagcgattgtctacttgttcattgggtttgtacctttaaaccttaaagttcttaacactctcaaccttgtgctacaactcaacacggcaaa

SEQ ID NO: 23412 - DNA, 543 bp, synthetic construct
  source 1..543: mol_type = other DNA
aagctgctcacgcggttgaaggagaaaacgcccgttacccggccaattacttcgagaaacctagtaccaccatggaggttgcgtagtgtttcgctccgcacaaccccagtgtagatcaggccgatgagtcaccgcgttccccacgggcgaccgtggcggtggctgcgttggcggcctgcccatgggataacccatgggacgcttcaatactgacatggtgcgaagagtctattgagctaattggtagtcctccggcccctgaatgcggctaatcccaactgcggagcagatacccacatgccagtgggcagtctgtcgtaacgggcaactctgcagcggaaccgactactttgggtgtccgtgtttccttttattcatacattggctgcttatggtgacaattgaaagattgttaccatatagctattggattggccatccggtgtctaatagagcgattgtctacttgttcattgggtttgtacctttaaaccttaaagttcttaacactctcaaccttgtgctacaactcaacacggcaaa

SEQ ID NO: 23413 - DNA, 693 bp, synthetic construct
  source 1..693: mol_type = other DNA
cactctggtatcacggtacctttgtgcgcctgttttatactccctccccccaaccgtaacttagaagcagcactaactgatcaatagccagcgcggcatgccagccacgcttcgatcaagcacttctgttaccccggactgagtatcaatagactgctcacgcggttgaaggagaaaacgttcgtcatccggccaactacttcgagaaacctagtaacaccatggaagttgcggagtgtttcgctcagcactaccccagtgtagatcaggtcgatgagtcaccgcattccccacaggcgactgtggcggtggctgcgttggcggcctgcccatggggaaacccatgggacgctcttatatagacatggtgcgaagagtctattgagctagttggtagtcctccggcccctgaatgcggctaatcctaactgcggagcatacaccctcaaaccagagggcagtgtgtcgtaatgggcaactctgcagcggaaccgactactttgggtgtccgtgtttcactttatttctaaattggctgcttatggtgacaattgagagattgttaccatatagctattggattggccatccggtgaccaatagagctattatatatctctttgttgggttcataccacttagcttgaaagaggttaaaactctgcattacattatactattgaattccgcaaa

SEQ ID NO: 23414 - DNA, 643 bp, synthetic construct
  source 1..643: mol_type = other DNA
caaccgtaacttagaagcagcactaactgatcaatagccagcgcggcatgccagccacgcttcgatcaagcacttctgttaccccggactgagtatcaatagactgctcacgcggttgaaggagaaaacgttcgtcatccggccaactacttcgagaaacctagtaacaccatggaagttgcggagtgtttcgctcagcactaccccagtgtagatcaggtcgatgagtcaccgcattccccacaggcgactgtggcggtggctgcgttggcggcctgcccatggggaaacccatgggacgctcttatatagacatggtgcgaagagtctattgagctagttggtagtcctccggcccctgaatgcggctaatcctaactgcggagcatacaccctcaaaccagagggcagtgtgtcgtaatgggcaactctgcagcggaaccgactactttgggtgtccgtgtttcactttatttctaaattggctgcttatggtgacaattgagagattgttaccatatagctattggattggccatccggtgaccaatagagctattatatatctctttgttgggttcataccacttagcttgaaagaggttaaaactctgcattacattatactattgaattccgcaaa

SEQ ID NO: 23415 - DNA, 593 bp, synthetic construct
  source 1..593: mol_type = other DNA
ccagccacgcttcgatcaagcacttctgttaccccggactgagtatcaatagactgctcacgcggttgaaggagaaaacgttcgtcatccggccaactacttcgagaaacctagtaacaccatggaagttgcggagtgtttcgctcagcactaccccagtgtagatcaggtcgatgagtcaccgcattccccacaggcgactgtggcggtggctgcgttggcggcctgcccatggggaaacccatgggacgctcttatatagacatggtgcgaagagtctattgagctagttggtagtcctccggcccctgaatgcggctaatcctaactgcggagcatacaccctcaaaccagagggcagtgtgtcgtaatgggcaactctgcagcggaaccgactactttgggtgtccgtgtttcactttatttctaaattggctgcttatggtgacaattgagagattgttaccatatagctattggattggccatccggtgaccaatagagctattatatatctctttgttgggttcataccacttagcttgaaagaggttaaaactctgcattacattatactattgaattccgcaaa

SEQ ID NO: 23416 - DNA, 543 bp, synthetic construct
  source 1..543: mol_type = other DNA
agactgctcacgcggttgaaggagaaaacgttcgtcatccggccaactacttcgagaaacctagtaacaccatggaagttgcggagtgtttcgctcagcactaccccagtgtagatcaggtcgatgagtcaccgcattccccacaggcgactgtggcggtggctgcgttggcggcctgcccatggggaaacccatgggacgctcttatatagacatggtgcgaagagtctattgagctagttggtagtcctccggcccctgaatgcggctaatcctaactgcggagcatacaccctcaaaccagagggcagtgtgtcgtaatgggcaactctgcagcggaaccgactactttgggtgtccgtgtttcactttatttctaaattggctgcttatggtgacaattgagagattgttaccatatagctattggattggccatccggtgaccaatagagctattatatatctctttgttgggttcataccacttagcttgaaagaggttaaaactctgcattacattatactattgaattccgcaaa

SEQ ID NO: 23417 - DNA, 693 bp, synthetic construct
  source 1..693: mol_type = other DNA
cactctggtatcacggtacccttgtgcgcctgttttataatccctttccccacaagtaacttagacacagcacaaaccgatcaacagtaggcgtgacactccagtcatgtcgtgatcaagcacttctgttaccccggaccgagtatcaatagactgcttacgcggttgaaggagaaaacgcccgttacccggccaactacttcgagaaacccagtaacaccatggaaattgcggagtgtttcgctcagcacaaccccagtgtagatcaggtcgatgagccaccacattccccacgggtgaccgtggtggtggctgcgttggcggcctgcctatgggggaacccataggacgcttcaatacggacatggtgcgaagagtctattgagctagttggtaatcctccggcccctgaatgcggctaatcctaactgcggagcgcgtgcccccaaaccaggaggtggcgcgtcgtaatgggcaactccgcagcggaaccgactactttgggtgtccgtgtttccttttatatttttattggctgcttatggtgacaattgagaaattgttaccatatagctattggattggccatccggtgtctaacagagcgattatttatctttttgttggatttgtaccactcaacataacaaactatcagactttgtgttgcattattggattgaacacagcaaa

SEQ ID NO: 23418 - DNA, 643 bp, synthetic construct
  source 1..643: mol_type = other DNA
cacaagtaacttagacacagcacaaaccgatcaacagtaggcgtgacactccagtcatgtcgtgatcaagcacttctgttaccccggaccgagtatcaatagactgcttacgcggttgaaggagaaaacgcccgttacccggccaactacttcgagaaacccagtaacaccatggaaattgcggagtgtttcgctcagcacaaccccagtgtagatcaggtcgatgagccaccacattccccacgggtgaccgtggtggtggctgcgttggcggcctgcctatgggggaacccataggacgcttcaatacggacatggtgcgaagagtctattgagctagttggtaatcctccggcccctgaatgcggctaatcctaactgcggagcgcgtgcccccaaaccaggaggtggcgcgtcgtaatgggcaactccgcagcggaaccgactactttgggtgtccgtgtttccttttatatttttattggctgcttatggtgacaattgagaaattgttaccatatagctattggattggccatccggtgtctaacagagcgattatttatctttttgttggatttgtaccactcaacataacaaactatcagactttgtgttgcattattggattgaacacagcaaa

SEQ ID NO: 23419 - DNA, 593 bp, synthetic construct
  source 1..593: mol_type = other DNA
ccagtcatgtcgtgatcaagcacttctgttaccccggaccgagtatcaatagactgcttacgcggttgaaggagaaaacgcccgttacccggccaactacttcgagaaacccagtaacaccatggaaattgcggagtgtttcgctcagcacaaccccagtgtagatcaggtcgatgagccaccacattccccacgggtgaccgtggtggtggctgcgttggcggcctgcctatgggggaacccataggacgcttcaatacggacatggtgcgaagagtctattgagctagttggtaatcctccggcccctgaatgcggctaatcctaactgcggagcgcgtgcccccaaaccaggaggtggcgcgtcgtaatgggcaactccgcagcggaaccgactactttgggtgtccgtgtttccttttatatttttattggctgcttatggtgacaattgagaaattgttaccatatagctattggattggccatccggtgtctaacagagcgattatttatctttttgttggatttgtaccactcaacataacaaactatcagactttgtgttgcattattggattgaacacagcaaa

SEQ ID NO: 23420 - DNA, 543 bp, synthetic construct
  source 1..543: mol_type = other DNA
agactgcttacgcggttgaaggagaaaacgcccgttacccggccaactacttcgagaaacccagtaacaccatggaaattgcggagtgtttcgctcagcacaaccccagtgtagatcaggtcgatgagccaccacattccccacgggtgaccgtggtggtggctgcgttggcggcctgcctatgggggaacccataggacgcttcaatacggacatggtgcgaagagtctattgagctagttggtaatcctccggcccctgaatgcggctaatcctaactgcggagcgcgtgcccccaaaccaggaggtggcgcgtcgtaatgggcaactccgcagcggaaccgactactttgggtgtccgtgtttccttttatatttttattggctgcttatggtgacaattgagaaattgttaccatatagctattggattggccatccggtgtctaacagagcgattatttatctttttgttggatttgtaccactcaacataacaaactatcagactttgtgttgcattattggattgaacacagcaaa

SEQ ID NO: 23421 - DNA, 693 bp, synthetic construct
  source 1..693: mol_type = other DNA
gcacactggtattacggtacccttgtgcgcctgttttatccacccccccccactgtaacttagaagataaccacacgcggtcaataggtgactcagtacgccaactgggtcgcgaccaagcacttctgttaccccggaccgagtatcaataagctgctcgcgcggctgaaggagaaaacgttcgttacccggccaattacttcgagaaacctagtaccaccatggaggttgcgcagcgtttcgctccgcacaaccccagtgtagatcaggtcgatgagtcaccgcaatccccacaggcgactgtggcggtggctgcgttggcggcctgcccatggggaaacccatgggacgcttcaatatcgacatggtgcgaagagtctattgagctaattggtagtcctccggcccctgaatgcggctaatcctaactgtggagcagatacccacactccagtgggcagtctgtcgtaatgggcaactctgcagcggaaccgactactttgggtgtccgtgtttccttttattcctatgctggctgcttatggtgacaattgacagattgttaccatatagctactggattggccatccggtgacaagcagagcgattgtttacttatttgttggtttcattccactcaattataaagtactaaacacccttaatttcattataactcttaacacgttaaa

SEQ ID NO: 23422 - DNA, 643 bp, synthetic construct
  source 1..643: mol_type = other DNA
cactgtaacttagaagataaccacacgcggtcaataggtgactcagtacgccaactgggtcgcgaccaagcacttctgttaccccggaccgagtatcaataagctgctcgcgcggctgaaggagaaaacgttcgttacccggccaattacttcgagaaacctagtaccaccatggaggttgcgcagcgtttcgctccgcacaaccccagtgtagatcaggtcgatgagtcaccgcaatccccacaggcgactgtggcggtggctgcgttggcggcctgcccatggggaaacccatgggacgcttcaatatcgacatggtgcgaagagtctattgagctaattggtagtcctccggcccctgaatgcggctaatcctaactgtggagcagatacccacactccagtgggcagtctgtcgtaatgggcaactctgcagcggaaccgactactttgggtgtccgtgtttccttttattcctatgctggctgcttatggtgacaattgacagattgttaccatatagctactggattggccatccggtgacaagcagagcgattgtttacttatttgttggtttcattccactcaattataaagtactaaacacccttaatttcattataactcttaacacgttaaa

SEQ ID NO: 23423 - DNA, 593 bp, synthetic construct
  source 1..593: mol_type = other DNA
ccaactgggtcgcgaccaagcacttctgttaccccggaccgagtatcaataagctgctcgcgcggctgaaggagaaaacgttcgttacccggccaattacttcgagaaacctagtaccaccatggaggttgcgcagcgtttcgctccgcacaaccccagtgtagatcaggtcgatgagtcaccgcaatccccacaggcgactgtggcggtggctgcgttggcggcctgcccatggggaaacccatgggacgcttcaatatcgacatggtgcgaagagtctattgagctaattggtagtcctccggcccctgaatgcggctaatcctaactgtggagcagatacccacactccagtgggcagtctgtcgtaatgggcaactctgcagcggaaccgactactttgggtgtccgtgtttccttttattcctatgctggctgcttatggtgacaattgacagattgttaccatatagctactggattggccatccggtgacaagcagagcgattgtttacttatttgttggtttcattccactcaattataaagtactaaacacccttaatttcattataactcttaacacgttaaa

SEQ ID NO: 23424 - DNA, 543 bp, synthetic construct
  source 1..543: mol_type = other DNA
aagctgctcgcgcggctgaaggagaaaacgttcgttacccggccaattacttcgagaaacctagtaccaccatggaggttgcgcagcgtttcgctccgcacaaccccagtgtagatcaggtcgatgagtcaccgcaatccccacaggcgactgtggcggtggctgcgttggcggcctgcccatggggaaacccatgggacgcttcaatatcgacatggtgcgaagagtctattgagctaattggtagtcctccggcccctgaatgcggctaatcctaactgtggagcagatacccacactccagtgggcagtctgtcgtaatgggcaactctgcagcggaaccgactactttgggtgtccgtgtttccttttattcctatgctggctgcttatggtgacaattgacagattgttaccatatagctactggattggccatccggtgacaagcagagcgattgtttacttatttgttggtttcattccactcaattataaagtactaaacacccttaatttcattataactcttaacacgttaaa

SEQ ID NO: 23425 - DNA, 693 bp, synthetic construct
  source 1..693: mol_type = other DNA
cacactggtatcacggtacctttgtgcgcctgttttatccacccttccccgaacgaaacttagaagtttgacttaaacggtcaatagaaagcccagtacaccaactgggtcgtgaccaagcacttctgtgaccccggactgagtatcaataagctactcacgtggctgaaggagaaaacgttcgttatccggccaattacttcgagaaacttagtaccaccatgaaggttgcgtagcgtttcgctccgcacaaccccagtgtagatcaggtcgatgagtcaccgcgttcctcacgggcgaccgtggcggtggctgcgttggcggcctgcccttggggcaacccaagggacgcttcaatactgacatggtgcgaagagtctattgagctaattggtagtcctccggcccctgaatgcggctaatcctaactgcggagcagatacccacatgccagtgggcagtctgtcgtaatgggcaactctgcagcggaaccgactactttgggtgtccgtgtttccttttattcttatactggctgcttatggtgacaattgagaaattgttaccatatagctattggattggccatccagtgtccaatagagcaatcatttaccttttcgttggatttattccacttgactacaaagcactcaaaacactcgaatacattgtagacctcaatacaacaaa

SEQ ID NO: 23426 - DNA, 643 bp, synthetic construct
  source 1..643: mol_type = other DNA
gaacgaaacttagaagtttgacttaaacggtcaatagaaagcccagtacaccaactgggtcgtgaccaagcacttctgtgaccccggactgagtatcaataagctactcacgtggctgaaggagaaaacgttcgttatccggccaattacttcgagaaacttagtaccaccatgaaggttgcgtagcgtttcgctccgcacaaccccagtgtagatcaggtcgatgagtcaccgcgttcctcacgggcgaccgtggcggtggctgcgttggcggcctgcccttggggcaacccaagggacgcttcaatactgacatggtgcgaagagtctattgagctaattggtagtcctccggcccctgaatgcggctaatcctaactgcggagcagatacccacatgccagtgggcagtctgtcgtaatgggcaactctgcagcggaaccgactactttgggtgtccgtgtttccttttattcttatactggctgcttatggtgacaattgagaaattgttaccatatagctattggattggccatccagtgtccaatagagcaatcatttaccttttcgttggatttattccacttgactacaaagcactcaaaacactcgaatacattgtagacctcaatacaacaaa

SEQ ID NO: 23427 - DNA, 593 bp, synthetic construct
  source 1..593: mol_type = other DNA
ccaactgggtcgtgaccaagcacttctgtgaccccggactgagtatcaataagctactcacgtggctgaaggagaaaacgttcgttatccggccaattacttcgagaaacttagtaccaccatgaaggttgcgtagcgtttcgctccgcacaaccccagtgtagatcaggtcgatgagtcaccgcgttcctcacgggcgaccgtggcggtggctgcgttggcggcctgcccttggggcaacccaagggacgcttcaatactgacatggtgcgaagagtctattgagctaattggtagtcctccggcccctgaatgcggctaatcctaactgcggagcagatacccacatgccagtgggcagtctgtcgtaatgggcaactctgcagcggaaccgactactttgggtgtccgtgtttccttttattcttatactggctgcttatggtgacaattgagaaattgttaccatatagctattggattggccatccagtgtccaatagagcaatcatttaccttttcgttggatttattccacttgactacaaagcactcaaaacactcgaatacattgtagacctcaatacaacaaa

SEQ ID NO: 23428 - DNA, 543 bp, synthetic construct
  source 1..543: mol_type = other DNA
aagctactcacgtggctgaaggagaaaacgttcgttatccggccaattacttcgagaaacttagtaccaccatgaaggttgcgtagcgtttcgctccgcacaaccccagtgtagatcaggtcgatgagtcaccgcgttcctcacgggcgaccgtggcggtggctgcgttggcggcctgcccttggggcaacccaagggacgcttcaatactgacatggtgcgaagagtctattgagctaattggtagtcctccggcccctgaatgcggctaatcctaactgcggagcagatacccacatgccagtgggcagtctgtcgtaatgggcaactctgcagcggaaccgactactttgggtgtccgtgtttccttttattcttatactggctgcttatggtgacaattgagaaattgttaccatatagctattggattggccatccagtgtccaatagagcaatcatttaccttttcgttggatttattccacttgactacaaagcactcaaaacactcgaatacattgtagacctcaatacaacaaa

SEQ ID NO: 23429 - DNA, 693 bp, synthetic construct
  source 1..693: mol_type = other DNA
gcacactggtatctaggtacccttgtgcgcctgttttattcgccccaccccatcgtaacttagaagttgatcaataatggtcgttaggtagcccagcacgccagctgggtcttgaccaagcacttctgttaccccggaccgagtatcaatacgctgctcacgcggctgaaggagaaaacgttcgttacccggccaattacttcgagaagcctagtaccaccatgaaggttgcgcagcgtttcgctccgcacaaccccagtgtagatcaggccgatgagtcaccgcactcctcacgggcgaccgtggcggtgactgcgttggcggcctgcccatggggtgacccatgggacgcttcaatactgacatggtgcgaagagcctattgagctaattggtagtcctccggcccctgaatgcggctaatcctaactgcggagcagatacccacacaccagtgggcagtctgtcgtaacgggcaactctgcagcggaaccgactactttgggtgtccgtgtttccttttattctaatattggctgcttatggtgacaattgaaaaattgttaccatatagctattggattggccatccggtgacaaatagagcgattgtttacctgtttgttggtttcataccattaaatcttaaagtcttaaaaacccttgattttatactagcactcaattcagcaaa

SEQ ID NO: 23430 - DNA, 643 bp, synthetic construct
  source 1..643: mol_type = other DNA
catcgtaacttagaagttgatcaataatggtcgttaggtagcccagcacgccagctgggtcttgaccaagcacttctgttaccccggaccgagtatcaatacgctgctcacgcggctgaaggagaaaacgttcgttacccggccaattacttcgagaagcctagtaccaccatgaaggttgcgcagcgtttcgctccgcacaaccccagtgtagatcaggccgatgagtcaccgcactcctcacgggcgaccgtggcggtgactgcgttggcggcctgcccatggggtgacccatgggacgcttcaatactgacatggtgcgaagagcctattgagctaattggtagtcctccggcccctgaatgcggctaatcctaactgcggagcagatacccacacaccagtgggcagtctgtcgtaacgggcaactctgcagcggaaccgactactttgggtgtccgtgtttccttttattctaatattggctgcttatggtgacaattgaaaaattgttaccatatagctattggattggccatccggtgacaaatagagcgattgtttacctgtttgttggtttcataccattaaatcttaaagtcttaaaaacccttgattttatactagcactcaattcagcaaa

SEQ ID NO: 23431 - DNA, 593 bp, synthetic construct
  source 1..593: mol_type = other DNA
ccagctgggtcttgaccaagcacttctgttaccccggaccgagtatcaatacgctgctcacgcggctgaaggagaaaacgttcgttacccggccaattacttcgagaagcctagtaccaccatgaaggttgcgcagcgtttcgctccgcacaaccccagtgtagatcaggccgatgagtcaccgcactcctcacgggcgaccgtggcggtgactgcgttggcggcctgcccatggggtgacccatgggacgcttcaatactgacatggtgcgaagagcctattgagctaattggtagtcctccggcccctgaatgcggctaatcctaactgcggagcagatacccacacaccagtgggcagtctgtcgtaacgggcaactctgcagcggaaccgactactttgggtgtccgtgtttccttttattctaatattggctgcttatggtgacaattgaaaaattgttaccatatagctattggattggccatccggtgacaaatagagcgattgtttacctgtttgttggtttcataccattaaatcttaaagtcttaaaaacccttgattttatactagcactcaattcagcaaa

SEQ ID NO: 23432 - DNA, 543 bp, synthetic construct
  source 1..543: mol_type = other DNA
acgctgctcacgcggctgaaggagaaaacgttcgttacccggccaattacttcgagaagcctagtaccaccatgaaggttgcgcagcgtttcgctccgcacaaccccagtgtagatcaggccgatgagtcaccgcactcctcacgggcgaccgtggcggtgactgcgttggcggcctgcccatggggtgacccatgggacgcttcaatactgacatggtgcgaagagcctattgagctaattggtagtcctccggcccctgaatgcggctaatcctaactgcggagcagatacccacacaccagtgggcagtctgtcgtaacgggcaactctgcagcggaaccgactactttgggtgtccgtgtttccttttattctaatattggctgcttatggtgacaattgaaaaattgttaccatatagctattggattggccatccggtgacaaatagagcgattgtttacctgtttgttggtttcataccattaaatcttaaagtcttaaaaacccttgattttatactagcactcaattcagcaaa

SEQ ID NO: 23433 - DNA, 693 bp, synthetic construct
  source 1..693: mol_type = other DNA
gcacactggtattacggtacctttgtgcgcctgttttatccacccttccctgatgtaacttagaagtaaaacataggcggtcaataggtagcccaacacaccagttgggtttcgaccaaacacttctgttaccccggaccgagtatcaataggctgctcacgcggctgaaggagaaaacgttcgttacccgaccaattacttcgagaaacccagtaacaccatgaaagttgcgcagtgtttcgctccgcacaaccccagtgtagatcaggtcgatgagtcaccgcattccccacgggcgaccgtggcggtggctgcgttggcggcctgcccatgggctaacccatgggacgctacaataccgacatggtgcgaagagtctattgagctaattggtagtcctccggcccctgaatgcggctaatcctaactgcggagcagatacccacacaccagtgggcggtctgtcgtaacgggcaactctgcagcggaaccgactactttgggtgtccgtgtttccttttattcctatattggctgcttatggtgacaattgagagattgttaccatatagctattggattggccatccggtgacaaacagggcggtcatttacctatttgttggttttgtaccattgaattttaaggtattgaaaaccctcaaccttgttttagcactcaatacagcaaa

SEQ ID NO: 23434 - DNA, 643 bp, synthetic construct
  source 1..643: mol_type = other DNA
tgatgtaacttagaagtaaaacataggcggtcaataggtagcccaacacaccagttgggtttcgaccaaacacttctgttaccccggaccgagtatcaataggctgctcacgcggctgaaggagaaaacgttcgttacccgaccaattacttcgagaaacccagtaacaccatgaaagttgcgcagtgtttcgctccgcacaaccccagtgtagatcaggtcgatgagtcaccgcattccccacgggcgaccgtggcggtggctgcgttggcggcctgcccatgggctaacccatgggacgctacaataccgacatggtgcgaagagtctattgagctaattggtagtcctccggcccctgaatgcggctaatcctaactgcggagcagatacccacacaccagtgggcggtctgtcgtaacgggcaactctgcagcggaaccgactactttgggtgtccgtgtttccttttattcctatattggctgcttatggtgacaattgagagattgttaccatatagctattggattggccatccggtgacaaacagggcggtcatttacctatttgttggttttgtaccattgaattttaaggtattgaaaaccctcaaccttgttttagcactcaatacagcaaa

SEQ ID NO: 23435 - DNA, 593 bp, synthetic construct
  source 1..593: mol_type = other DNA
ccagttgggtttcgaccaaacacttctgttaccccggaccgagtatcaataggctgctcacgcggctgaaggagaaaacgttcgttacccgaccaattacttcgagaaacccagtaacaccatgaaagttgcgcagtgtttcgctccgcacaaccccagtgtagatcaggtcgatgagtcaccgcattccccacgggcgaccgtggcggtggctgcgttggcggcctgcccatgggctaacccatgggacgctacaataccgacatggtgcgaagagtctattgagctaattggtagtcctccggcccctgaatgcggctaatcctaactgcggagcagatacccacacaccagtgggcggtctgtcgtaacgggcaactctgcagcggaaccgactactttgggtgtccgtgtttccttttattcctatattggctgcttatggtgacaattgagagattgttaccatatagctattggattggccatccggtgacaaacagggcggtcatttacctatttgttggttttgtaccattgaattttaaggtattgaaaaccctcaaccttgttttagcactcaatacagcaaa

SEQ ID NO: 23436 - DNA, 543 bp, synthetic construct
  source 1..543: mol_type = other DNA
aggctgctcacgcggctgaaggagaaaacgttcgttacccgaccaattacttcgagaaacccagtaacaccatgaaagttgcgcagtgtttcgctccgcacaaccccagtgtagatcaggtcgatgagtcaccgcattccccacgggcgaccgtggcggtggctgcgttggcggcctgcccatgggctaacccatgggacgctacaataccgacatggtgcgaagagtctattgagctaattggtagtcctccggcccctgaatgcggctaatcctaactgcggagcagatacccacacaccagtgggcggtctgtcgtaacgggcaactctgcagcggaaccgactactttgggtgtccgtgtttccttttattcctatattggctgcttatggtgacaattgagagattgttaccatatagctattggattggccatccggtgacaaacagggcggtcatttacctatttgttggttttgtaccattgaattttaaggtattgaaaaccctcaaccttgttttagcactcaatacagcaaa

SEQ ID NO: 23437 - DNA, 693 bp, synthetic construct
  source 1..693: mol_type = other DNA
cactctggtattgcggtacctttgtgcgcctgttttatattccctccccctgaccgtaacttagaagtaacacacaccgatcaacagtaagcatggcacaccagccatgttttgatcaagcacttctgttatcccggactgagtatcaatagactgctcacgcggttgaaggagaaaacgttcgttacccggccaactacttcgaaaaacctagtaacaccatggaagttgcagagtgtttcgctcagcactaccccagtgtagatcaggtcgatgagtcaccgcattccccacgggcgaccgtggcggtggctgcgttggcggcctgcctatggggaaacccataggacgctctaatacagacatggtgcgaagagtctattgagctagttggtagtcctccggcccctgaatgcggctaatcctaactgcggagcacacaccctcaagccagggggcagtgtgtcgtaacgggcaactctgcagcggaaccgactactttgggtgtccgtgtttccccttactcttgtattggctgcttatggtgacaattttggaattgttgccatatagctattggattggccatccggtgacaaacagagcgattgtatacctattcgttggacttgtaccgctcaacgttacgagtctaacgactttatactacatcatctggttgaacacagcaaa

SEQ ID NO: 23438 - DNA, 643 bp, synthetic construct
  source 1..643: mol_type = other DNA
tgaccgtaacttagaagtaacacacaccgatcaacagtaagcatggcacaccagccatgttttgatcaagcacttctgttatcccggactgagtatcaatagactgctcacgcggttgaaggagaaaacgttcgttacccggccaactacttcgaaaaacctagtaacaccatggaagttgcagagtgtttcgctcagcactaccccagtgtagatcaggtcgatgagtcaccgcattccccacgggcgaccgtggcggtggctgcgttggcggcctgcctatggggaaacccataggacgctctaatacagacatggtgcgaagagtctattgagctagttggtagtcctccggcccctgaatgcggctaatcctaactgcggagcacacaccctcaagccagggggcagtgtgtcgtaacgggcaactctgcagcggaaccgactactttgggtgtccgtgtttccccttactcttgtattggctgcttatggtgacaattttggaattgttgccatatagctattggattggccatccggtgacaaacagagcgattgtatacctattcgttggacttgtaccgctcaacgttacgagtctaacgactttatactacatcatctggttgaacacagcaaa

SEQ ID NO: 23439 - DNA, 593 bp, synthetic construct
  source 1..593: mol_type = other DNA
ccagccatgttttgatcaagcacttctgttatcccggactgagtatcaatagactgctcacgcggttgaaggagaaaacgttcgttacccggccaactacttcgaaaaacctagtaacaccatggaagttgcagagtgtttcgctcagcactaccccagtgtagatcaggtcgatgagtcaccgcattccccacgggcgaccgtggcggtggctgcgttggcggcctgcctatggggaaacccataggacgctctaatacagacatggtgcgaagagtctattgagctagttggtagtcctccggcccctgaatgcggctaatcctaactgcggagcacacaccctcaagccagggggcagtgtgtcgtaacgggcaactctgcagcggaaccgactactttgggtgtccgtgtttccccttactcttgtattggctgcttatggtgacaattttggaattgttgccatatagctattggattggccatccggtgacaaacagagcgattgtatacctattcgttggacttgtaccgctcaacgttacgagtctaacgactttatactacatcatctggttgaacacagcaaa

SEQ ID NO: 23440 - DNA, 543 bp, synthetic construct
  source 1..543: mol_type = other DNA
agactgctcacgcggttgaaggagaaaacgttcgttacccggccaactacttcgaaaaacctagtaacaccatggaagttgcagagtgtttcgctcagcactaccccagtgtagatcaggtcgatgagtcaccgcattccccacgggcgaccgtggcggtggctgcgttggcggcctgcctatggggaaacccataggacgctctaatacagacatggtgcgaagagtctattgagctagttggtagtcctccggcccctgaatgcggctaatcctaactgcggagcacacaccctcaagccagggggcagtgtgtcgtaacgggcaactctgcagcggaaccgactactttgggtgtccgtgtttccccttactcttgtattggctgcttatggtgacaattttggaattgttgccatatagctattggattggccatccggtgacaaacagagcgattgtatacctattcgttggacttgtaccgctcaacgttacgagtctaacgactttatactacatcatctggttgaacacagcaaa

SEQ ID NO: 23441 - DNA, 693 bp, synthetic construct
  source 1..693: mol_type = other DNA
cactctggtatcacggtaccttagtgcgcctgttttatatcccccacccccacttgaaacttagaagcaaaacatactgaccaatagttgacatggcaagccagccgtgccttggtcaagcacctctgtttccccggaccgagtatcaatagactgctagcgcggttgaaggagaaagcgttcgttacccgactaactacttcgaaaaacctagtagcatcatgaaagttgcagagtgtttcgctcagcacaaccccagtgtagatcaggccgatgagtcaccgcattcctcacgggtgaccgtggcggtggctgcgctggcggcctgcctgtggggcaacccacaggacgctctaatacagacatggtgcgaagagtctattgagctagttagtagtcctccggcccctgaatgcggctaatcctaactgcggagcacgtgcctctaatccaagaggtagcgtgtcgtaacgggcaactctgcagcggaaccgactactttgggtgtccgtgtttccttttatttttatactggctgcttatggtgacaattgagagattgttaccatatagctattggattggccatccggtgactaatagagctattgtatacctctttattggttacgttccattaaaccgcaaggaattaaggaccctcaattacatcttgcttttgaattcagcaaa

SEQ ID NO: 23442 - DNA, 643 bp, synthetic construct
  source 1..643: mol_type = other DNA
cacttgaaacttagaagcaaaacatactgaccaatagttgacatggcaagccagccgtgccttggtcaagcacctctgtttccccggaccgagtatcaatagactgctagcgcggttgaaggagaaagcgttcgttacccgactaactacttcgaaaaacctagtagcatcatgaaagttgcagagtgtttcgctcagcacaaccccagtgtagatcaggccgatgagtcaccgcattcctcacgggtgaccgtggcggtggctgcgctggcggcctgcctgtggggcaacccacaggacgctctaatacagacatggtgcgaagagtctattgagctagttagtagtcctccggcccctgaatgcggctaatcctaactgcggagcacgtgcctctaatccaagaggtagcgtgtcgtaacgggcaactctgcagcggaaccgactactttgggtgtccgtgtttccttttatttttatactggctgcttatggtgacaattgagagattgttaccatatagctattggattggccatccggtgactaatagagctattgtatacctctttattggttacgttccattaaaccgcaaggaattaaggaccctcaattacatcttgcttttgaattcagcaaa

SEQ ID NO: 23443 - DNA, 593 bp, synthetic construct
  source 1..593: mol_type = other DNA
ccagccgtgccttggtcaagcacctctgtttccccggaccgagtatcaatagactgctagcgcggttgaaggagaaagcgttcgttacccgactaactacttcgaaaaacctagtagcatcatgaaagttgcagagtgtttcgctcagcacaaccccagtgtagatcaggccgatgagtcaccgcattcctcacgggtgaccgtggcggtggctgcgctggcggcctgcctgtggggcaacccacaggacgctctaatacagacatggtgcgaagagtctattgagctagttagtagtcctccggcccctgaatgcggctaatcctaactgcggagcacgtgcctctaatccaagaggtagcgtgtcgtaacgggcaactctgcagcggaaccgactactttgggtgtccgtgtttccttttatttttatactggctgcttatggtgacaattgagagattgttaccatatagctattggattggccatccggtgactaatagagctattgtatacctctttattggttacgttccattaaaccgcaaggaattaaggaccctcaattacatcttgcttttgaattcagcaaa

SEQ ID NO: 23444 - DNA, 543 bp, synthetic construct
  source 1..543: mol_type = other DNA
agactgctagcgcggttgaaggagaaagcgttcgttacccgactaactacttcgaaaaacctagtagcatcatgaaagttgcagagtgtttcgctcagcacaaccccagtgtagatcaggccgatgagtcaccgcattcctcacgggtgaccgtggcggtggctgcgctggcggcctgcctgtggggcaacccacaggacgctctaatacagacatggtgcgaagagtctattgagctagttagtagtcctccggcccctgaatgcggctaatcctaactgcggagcacgtgcctctaatccaagaggtagcgtgtcgtaacgggcaactctgcagcggaaccgactactttgggtgtccgtgtttccttttatttttatactggctgcttatggtgacaattgagagattgttaccatatagctattggattggccatccggtgactaatagagctattgtatacctctttattggttacgttccattaaaccgcaaggaattaaggaccctcaattacatcttgcttttgaattcagcaaa

SEQ ID NO: 23445 - DNA, 693 bp, synthetic construct
  source 1..693: mol_type = other DNA
tacactggtatcacggtacctttgtgcgcctgtttgactcaccttccccaaacgcaacttagaagcataacttaaatggtcattaggcggctcagtatgccaactgagtctcgatcaagcacttctgttaccccggactgagtaccaataggctgctcacgcggctgaaagggaaaccgttcgttacccgaccaactacttcgagaaacctagtaccaccatgaaagttgcgcggcgtttcgctccgcacaaccccagtgtagatcaggccgatgagtcaccgcaaaccccacgggcgaccgtggcggtggctgcgctggcggcctgcccatgggacaacccatgggacgccacaatactgacatgatgcgaagagtctattgagctagttggtagtcctccggcccctgaatgcggctaatcccaactgtggagcagatacccacgcaccagtgggcagtctgtcgtaatgggcaactctacagcggaaccgactactttgggtgtccgtgtttctttttattcctacgctggctacttatggtgacaattgagagactgtaaccatattgctatcgggttggccacctggtgaagaataaaacagttgctcactcgtttgtcagtcttgcaccgtcgtgccacaaagtcttaactgcccctcaacatcgtcataatactaaatacgctgaa

SEQ ID NO: 23446 - DNA, 643 bp, synthetic construct
  source 1..643: mol_type = other DNA
aacgcaacttagaagcataacttaaatggtcattaggcggctcagtatgccaactgagtctcgatcaagcacttctgttaccccggactgagtaccaataggctgctcacgcggctgaaagggaaaccgttcgttacccgaccaactacttcgagaaacctagtaccaccatgaaagttgcgcggcgtttcgctccgcacaaccccagtgtagatcaggccgatgagtcaccgcaaaccccacgggcgaccgtggcggtggctgcgctggcggcctgcccatgggacaacccatgggacgccacaatactgacatgatgcgaagagtctattgagctagttggtagtcctccggcccctgaatgcggctaatcccaactgtggagcagatacccacgcaccagtgggcagtctgtcgtaatgggcaactctacagcggaaccgactactttgggtgtccgtgtttctttttattcctacgctggctacttatggtgacaattgagagactgtaaccatattgctatcgggttggccacctggtgaagaataaaacagttgctcactcgtttgtcagtcttgcaccgtcgtgccacaaagtcttaactgcccctcaacatcgtcataatactaaatacgctgaa

SEQ ID NO: 23447 - DNA, 593 bp, synthetic construct
  source 1..593: mol_type = other DNA
caactgagtctcgatcaagcacttctgttaccccggactgagtaccaataggctgctcacgcggctgaaagggaaaccgttcgttacccgaccaactacttcgagaaacctagtaccaccatgaaagttgcgcggcgtttcgctccgcacaaccccagtgtagatcaggccgatgagtcaccgcaaaccccacgggcgaccgtggcggtggctgcgctggcggcctgcccatgggacaacccatgggacgccacaatactgacatgatgcgaagagtctattgagctagttggtagtcctccggcccctgaatgcggctaatcccaactgtggagcagatacccacgcaccagtgggcagtctgtcgtaatgggcaactctacagcggaaccgactactttgggtgtccgtgtttctttttattcctacgctggctacttatggtgacaattgagagactgtaaccatattgctatcgggttggccacctggtgaagaataaaacagttgctcactcgtttgtcagtcttgcaccgtcgtgccacaaagtcttaactgcccctcaacatcgtcataatactaaatacgctgaa

SEQ ID NO: 23448 - DNA, 543 bp, synthetic construct
  source 1..543: mol_type = other DNA
ggctgctcacgcggctgaaagggaaaccgttcgttacccgaccaactacttcgagaaacctagtaccaccatgaaagttgcgcggcgtttcgctccgcacaaccccagtgtagatcaggccgatgagtcaccgcaaaccccacgggcgaccgtggcggtggctgcgctggcggcctgcccatgggacaacccatgggacgccacaatactgacatgatgcgaagagtctattgagctagttggtagtcctccggcccctgaatgcggctaatcccaactgtggagcagatacccacgcaccagtgggcagtctgtcgtaatgggcaactctacagcggaaccgactactttgggtgtccgtgtttctttttattcctacgctggctacttatggtgacaattgagagactgtaaccatattgctatcgggttggccacctggtgaagaataaaacagttgctcactcgtttgtcagtcttgcaccgtcgtgccacaaagtcttaactgcccctcaacatcgtcataatactaaatacgctgaa

SEQ ID NO: 23449 - DNA, 693 bp, synthetic construct
  source 1..693: mol_type = other DNA
cacactggtatcacggtacctttgtgcgcctgtttgacttaccctccccaaacgcaacttagaagcacaacttaaatggtcaatagacggctcagtatgccaactgagtctcgatcaagcacttctgttaccccggactgagtaccaataggctgctcacgcggctgaaggggaaaccgttcgttacccgactaactacttcgagaaacctagtaccaccatgaaagttgcgcagcgtttcgctccgcacaaccccagtgtagatcaggccgatgagtcaccgcaaaccccacgggcgaccgtggcggtggctgcgctggcggcctgcccatggggcaactcatgggatgcttcaatactgacatggtgcgaagagtctattgagctagttggtagtcctccggcccctgaatgcggctaatcctaactgcggagcagatacccacgcaccagtgggcagtctgtcgtaatgggcaactctgcagcggaaccgactactttgggtgtccgtgtttccttttatccttatactggctacttatggtgacaattgagagattgtaaccatattgctattggattggccacccggcgacgaatagaacagttgcttacctgtttgttagtctcgtgtcactgaactgcaaggccttaaacaccctttaatttcatcataacgctcaatacgttaaa

SEQ ID NO: 23450 - DNA, 643 bp, synthetic construct
  source 1..643: mol_type = other DNA
aacgcaacttagaagcacaacttaaatggtcaatagacggctcagtatgccaactgagtctcgatcaagcacttctgttaccccggactgagtaccaataggctgctcacgcggctgaaggggaaaccgttcgttacccgactaactacttcgagaaacctagtaccaccatgaaagttgcgcagcgtttcgctccgcacaaccccagtgtagatcaggccgatgagtcaccgcaaaccccacgggcgaccgtggcggtggctgcgctggcggcctgcccatggggcaactcatgggatgcttcaatactgacatggtgcgaagagtctattgagctagttggtagtcctccggcccctgaatgcggctaatcctaactgcggagcagatacccacgcaccagtgggcagtctgtcgtaatgggcaactctgcagcggaaccgactactttgggtgtccgtgtttccttttatccttatactggctacttatggtgacaattgagagattgtaaccatattgctattggattggccacccggcgacgaatagaacagttgcttacctgtttgttagtctcgtgtcactgaactgcaaggccttaaacaccctttaatttcatcataacgctcaatacgttaaa

SEQ ID NO: 23451 - DNA, 593 bp, synthetic construct
  source 1..593: mol_type = other DNA
caactgagtctcgatcaagcacttctgttaccccggactgagtaccaataggctgctcacgcggctgaaggggaaaccgttcgttacccgactaactacttcgagaaacctagtaccaccatgaaagttgcgcagcgtttcgctccgcacaaccccagtgtagatcaggccgatgagtcaccgcaaaccccacgggcgaccgtggcggtggctgcgctggcggcctgcccatggggcaactcatgggatgcttcaatactgacatggtgcgaagagtctattgagctagttggtagtcctccggcccctgaatgcggctaatcctaactgcggagcagatacccacgcaccagtgggcagtctgtcgtaatgggcaactctgcagcggaaccgactactttgggtgtccgtgtttccttttatccttatactggctacttatggtgacaattgagagattgtaaccatattgctattggattggccacccggcgacgaatagaacagttgcttacctgtttgttagtctcgtgtcactgaactgcaaggccttaaacaccctttaatttcatcataacgctcaatacgttaaa

SEQ ID NO: 23452 - DNA, 543 bp, synthetic construct
  source 1..543: mol_type = other DNA
ggctgctcacgcggctgaaggggaaaccgttcgttacccgactaactacttcgagaaacctagtaccaccatgaaagttgcgcagcgtttcgctccgcacaaccccagtgtagatcaggccgatgagtcaccgcaaaccccacgggcgaccgtggcggtggctgcgctggcggcctgcccatggggcaactcatgggatgcttcaatactgacatggtgcgaagagtctattgagctagttggtagtcctccggcccctgaatgcggctaatcctaactgcggagcagatacccacgcaccagtgggcagtctgtcgtaatgggcaactctgcagcggaaccgactactttgggtgtccgtgtttccttttatccttatactggctacttatggtgacaattgagagattgtaaccatattgctattggattggccacccggcgacgaatagaacagttgcttacctgtttgttagtctcgtgtcactgaactgcaaggccttaaacaccctttaatttcatcataacgctcaatacgttaaa

SEQ ID NO: 23453 - DNA, 693 bp, synthetic construct
  source 1..693: mol_type = other DNA
cactctggtattgcggtacctttgtgcgcctgttttacccaccctcccccaacgtaacttagaagcctgacatatacggtcacaagccagcccagtacgccaactgggtaccgaccaagcacttctgttaccccggactgagtatcaataagctgccaaagcggctgaaggagaaaacgttcgttacccggccaattacttcgagaaacccagtaacaccatgaaagttgcgtagcgtttcattcagcacaatcccagtgtagatcaggtcgatgagtcaccgcattccccacaggcgactgtggcggtggctgcgttggcggcctgcccatggggcaaacccatgggacgcttcaatactgacatggtgcgaagagtctattgagctaattggtagtcctccggcccctgaatgcggctaatcctaactgcggagcaggcactcgcagaccagcgagcagcttgtcgtaatgggcaactccgcagcggaaccgactactttgggtgtccgtgtttcctatttcctttacactggctgcttatggtgacaattgagaaattgttaccatatagctattggagtggccatccggtgactaacagagcaataatatatttgtttgttggctttgtgccacttaatttgaaggttgttaagacgctcaatctgatactacttctaaataaagcaaa

SEQ ID NO: 23454 - DNA, 643 bp, synthetic construct
  source 1..643: mol_type = other DNA
aacgtaacttagaagcctgacatatacggtcacaagccagcccagtacgccaactgggtaccgaccaagcacttctgttaccccggactgagtatcaataagctgccaaagcggctgaaggagaaaacgttcgttacccggccaattacttcgagaaacccagtaacaccatgaaagttgcgtagcgtttcattcagcacaatcccagtgtagatcaggtcgatgagtcaccgcattccccacaggcgactgtggcggtggctgcgttggcggcctgcccatggggcaaacccatgggacgcttcaatactgacatggtgcgaagagtctattgagctaattggtagtcctccggcccctgaatgcggctaatcctaactgcggagcaggcactcgcagaccagcgagcagcttgtcgtaatgggcaactccgcagcggaaccgactactttgggtgtccgtgtttcctatttcctttacactggctgcttatggtgacaattgagaaattgttaccatatagctattggagtggccatccggtgactaacagagcaataatatatttgtttgttggctttgtgccacttaatttgaaggttgttaagacgctcaatctgatactacttctaaataaagcaaa

SEQ ID NO: 23455 - DNA, 593 bp, synthetic construct
  source 1..593: mol_type = other DNA
caactgggtaccgaccaagcacttctgttaccccggactgagtatcaataagctgccaaagcggctgaaggagaaaacgttcgttacccggccaattacttcgagaaacccagtaacaccatgaaagttgcgtagcgtttcattcagcacaatcccagtgtagatcaggtcgatgagtcaccgcattccccacaggcgactgtggcggtggctgcgttggcggcctgcccatggggcaaacccatgggacgcttcaatactgacatggtgcgaagagtctattgagctaattggtagtcctccggcccctgaatgcggctaatcctaactgcggagcaggcactcgcagaccagcgagcagcttgtcgtaatgggcaactccgcagcggaaccgactactttgggtgtccgtgtttcctatttcctttacactggctgcttatggtgacaattgagaaattgttaccatatagctattggagtggccatccggtgactaacagagcaataatatatttgtttgttggctttgtgccacttaatttgaaggttgttaagacgctcaatctgatactacttctaaataaagcaaa

SEQ ID NO: 23456 - DNA, 543 bp, synthetic construct
  source 1..543: mol_type = other DNA
agctgccaaagcggctgaaggagaaaacgttcgttacccggccaattacttcgagaaacccagtaacaccatgaaagttgcgtagcgtttcattcagcacaatcccagtgtagatcaggtcgatgagtcaccgcattccccacaggcgactgtggcggtggctgcgttggcggcctgcccatggggcaaacccatgggacgcttcaatactgacatggtgcgaagagtctattgagctaattggtagtcctccggcccctgaatgcggctaatcctaactgcggagcaggcactcgcagaccagcgagcagcttgtcgtaatgggcaactccgcagcggaaccgactactttgggtgtccgtgtttcctatttcctttacactggctgcttatggtgacaattgagaaattgttaccatatagctattggagtggccatccggtgactaacagagcaataatatatttgtttgttggctttgtgccacttaatttgaaggttgttaagacgctcaatctgatactacttctaaataaagcaaa

SEQ ID NO: 23457 - DNA, 693 bp, synthetic construct
  source 1..693: mol_type = other DNA
cacactggtatcacggtacctttgtgcgcctgttttatactcccccccctaaggaaactttagaagcaaagcaattgtgatcaatagtgggtatggcacaccagtcatatcttgatcaagcacttctgttcccccggacttagtaccaatagactgctcaagcggttgaaggggaaaacgttcgttatccggccaactacttcgagaaacctagtagcaccatgaaagttgcggagtgtttcgctcagcacttcccccgtgtagatcaggctgatgagtcaccgtattccccacgggcgaccgtgacggtggctgcgttggcggcctgcccatggggtaacccatgggacgctctaaaacagacacggtgcgaagagtctattgagctagttggtagtcctccggcccctgaatgcggccaatcctaactgcggagcacatactcccaatccagggagcagtgtgtcgtaatgggtaactctgcagcggaaccgactactttgggtgtccgtgtttccttttattctcacattgactgcttatggtgacaattgaaagattgttaccatatagctattggattggtcatccggtgagcaatagagctattgtttatcaatttgttggatttgtaccactcaacttttctgttttgagaacactcaactacatcttactgctaaacacatcaaa

SEQ ID NO: 23458 - DNA, 643 bp, synthetic construct
  source 1..643: mol_type = other DNA
aaggaaactttagaagcaaagcaattgtgatcaatagtgggtatggcacaccagtcatatcttgatcaagcacttctgttcccccggacttagtaccaatagactgctcaagcggttgaaggggaaaacgttcgttatccggccaactacttcgagaaacctagtagcaccatgaaagttgcggagtgtttcgctcagcacttcccccgtgtagatcaggctgatgagtcaccgtattccccacgggcgaccgtgacggtggctgcgttggcggcctgcccatggggtaacccatgggacgctctaaaacagacacggtgcgaagagtctattgagctagttggtagtcctccggcccctgaatgcggccaatcctaactgcggagcacatactcccaatccagggagcagtgtgtcgtaatgggtaactctgcagcggaaccgactactttgggtgtccgtgtttccttttattctcacattgactgcttatggtgacaattgaaagattgttaccatatagctattggattggtcatccggtgagcaatagagctattgtttatcaatttgttggatttgtaccactcaacttttctgttttgagaacactcaactacatcttactgctaaacacatcaaa

SEQ ID NO: 23459 - DNA, 593 bp, synthetic construct
  source 1..593: mol_type = other DNA
ccagtcatatcttgatcaagcacttctgttcccccggacttagtaccaatagactgctcaagcggttgaaggggaaaacgttcgttatccggccaactacttcgagaaacctagtagcaccatgaaagttgcggagtgtttcgctcagcacttcccccgtgtagatcaggctgatgagtcaccgtattccccacgggcgaccgtgacggtggctgcgttggcggcctgcccatggggtaacccatgggacgctctaaaacagacacggtgcgaagagtctattgagctagttggtagtcctccggcccctgaatgcggccaatcctaactgcggagcacatactcccaatccagggagcagtgtgtcgtaatgggtaactctgcagcggaaccgactactttgggtgtccgtgtttccttttattctcacattgactgcttatggtgacaattgaaagattgttaccatatagctattggattggtcatccggtgagcaatagagctattgtttatcaatttgttggatttgtaccactcaacttttctgttttgagaacactcaactacatcttactgctaaacacatcaaa

SEQ ID NO: 23460 - DNA, 543 bp, synthetic construct
  source 1..543: mol_type = other DNA
agactgctcaagcggttgaaggggaaaacgttcgttatccggccaactacttcgagaaacctagtagcaccatgaaagttgcggagtgtttcgctcagcacttcccccgtgtagatcaggctgatgagtcaccgtattccccacgggcgaccgtgacggtggctgcgttggcggcctgcccatggggtaacccatgggacgctctaaaacagacacggtgcgaagagtctattgagctagttggtagtcctccggcccctgaatgcggccaatcctaactgcggagcacatactcccaatccagggagcagtgtgtcgtaatgggtaactctgcagcggaaccgactactttgggtgtccgtgtttccttttattctcacattgactgcttatggtgacaattgaaagattgttaccatatagctattggattggtcatccggtgagcaatagagctattgtttatcaatttgttggatttgtaccactcaacttttctgttttgagaacactcaactacatcttactgctaaacacatcaaa

SEQ ID NO: 23461 - DNA, 693 bp, synthetic construct
  source 1..693: mol_type = other DNA
cacactggtatcccggtacctttgtgcgcctgttttatacaccccaaaccccaatgtaaattagaagaaaataacaccgatcaatagtgggtgtggcacaacagccacatcatgatcaagcactactgttcccccggactgagtatcaataagctgctcgcgcggctgaaggagaaaacgttcgttatccggccaattacttcgagaaacctagtaccaccatgaaggttgcgcagtgtttcgctccacacaaccccagtgtagatcaggtcgatgagtcaccgcattccccacaggcgactgtggcggtggctgcgctggcggcctgcccatggggtgacccatgggacgcttcaatactgacatggtgtgaagagtctattgagctaattggtagtcctccggcccctgaatgcggctaatcctaactgcggagcagatacccacgcaccagtgggtagtctgtcgtaacgggtaactctgcagtggaaccgactactttgggtgtccgtgtttccttttattctcacattggctgcttatggtgacaattgaaagattgttaccatatagctactggattggccatccggtgacaaacagagcaattgtgttcctcttcgatgggttcatacctctcaacaagatcagctttcgaactttgtgctacatcatcaagctaaacacaacaaa

SEQ ID NO: 23462 - DNA, 643 bp, synthetic construct
  source 1..643: mol_type = other DNA
ccaatgtaaattagaagaaaataacaccgatcaatagtgggtgtggcacaacagccacatcatgatcaagcactactgttcccccggactgagtatcaataagctgctcgcgcggctgaaggagaaaacgttcgttatccggccaattacttcgagaaacctagtaccaccatgaaggttgcgcagtgtttcgctccacacaaccccagtgtagatcaggtcgatgagtcaccgcattccccacaggcgactgtggcggtggctgcgctggcggcctgcccatggggtgacccatgggacgcttcaatactgacatggtgtgaagagtctattgagctaattggtagtcctccggcccctgaatgcggctaatcctaactgcggagcagatacccacgcaccagtgggtagtctgtcgtaacgggtaactctgcagtggaaccgactactttgggtgtccgtgtttccttttattctcacattggctgcttatggtgacaattgaaagattgttaccatatagctactggattggccatccggtgacaaacagagcaattgtgttcctcttcgatgggttcatacctctcaacaagatcagctttcgaactttgtgctacatcatcaagctaaacacaacaaa

SEQ ID NO: 23463 - DNA, 593 bp, synthetic construct
  source 1..593: mol_type = other DNA
acagccacatcatgatcaagcactactgttcccccggactgagtatcaataagctgctcgcgcggctgaaggagaaaacgttcgttatccggccaattacttcgagaaacctagtaccaccatgaaggttgcgcagtgtttcgctccacacaaccccagtgtagatcaggtcgatgagtcaccgcattccccacaggcgactgtggcggtggctgcgctggcggcctgcccatggggtgacccatgggacgcttcaatactgacatggtgtgaagagtctattgagctaattggtagtcctccggcccctgaatgcggctaatcctaactgcggagcagatacccacgcaccagtgggtagtctgtcgtaacgggtaactctgcagtggaaccgactactttgggtgtccgtgtttccttttattctcacattggctgcttatggtgacaattgaaagattgttaccatatagctactggattggccatccggtgacaaacagagcaattgtgttcctcttcgatgggttcatacctctcaacaagatcagctttcgaactttgtgctacatcatcaagctaaacacaacaaa

SEQ ID NO: 23464 - DNA, 543 bp, synthetic construct
  source 1..543: mol_type = other DNA
aagctgctcgcgcggctgaaggagaaaacgttcgttatccggccaattacttcgagaaacctagtaccaccatgaaggttgcgcagtgtttcgctccacacaaccccagtgtagatcaggtcgatgagtcaccgcattccccacaggcgactgtggcggtggctgcgctggcggcctgcccatggggtgacccatgggacgcttcaatactgacatggtgtgaagagtctattgagctaattggtagtcctccggcccctgaatgcggctaatcctaactgcggagcagatacccacgcaccagtgggtagtctgtcgtaacgggtaactctgcagtggaaccgactactttgggtgtccgtgtttccttttattctcacattggctgcttatggtgacaattgaaagattgttaccatatagctactggattggccatccggtgacaaacagagcaattgtgttcctcttcgatgggttcatacctctcaacaagatcagctttcgaactttgtgctacatcatcaagctaaacacaacaaa

SEQ ID NO: 23465 - DNA, 693 bp, synthetic construct
  source 1..693: mol_type = other DNA
cacactggtatcacggtacccttgtgcgcctgttttatccaccccccccttaacgtaacttagaagcataaatcaaatggtcaatagataacccagtatgccaactgggtcccgaccaagtacttctgttaccccggactgagtatcaataagctgcttacgtggctgaaggagaaaacgttcgttacccgaccaattacttcgagaaacctagtaacaccatgaaggttgcgcagtgtttcgctcaacacaaccccagtgtagatcaggtcgatgagtcaccgcgttccccacaggcgaccgtggcggtggctgcgttggcggcctgctcatggggcaacccatgagacgcttcaatactgacatggtgcgaagagtctattgagctaactggtagtcctccggcccctgaatgcggctaatcctaactgcggagcaggcgctcgcaaaccagtgagtagcctgtcgtaacgggtaactctgcagcggaaccgactactttgggtgtccgtgtttccttttattcttatattggctgcttatggtgacaattgagagattgttaccatatagctattggattggccatccggtgtctaacagagcaatcatttacctctttgttggttacgtaccattaaatcttaaggtcgtagcaacgcttaagtttatcctacttctcaacaaagcaaa

SEQ ID NO: 23466 - DNA, 643 bp, synthetic construct
  source 1..643: mol_type = other DNA
taacgtaacttagaagcataaatcaaatggtcaatagataacccagtatgccaactgggtcccgaccaagtacttctgttaccccggactgagtatcaataagctgcttacgtggctgaaggagaaaacgttcgttacccgaccaattacttcgagaaacctagtaacaccatgaaggttgcgcagtgtttcgctcaacacaaccccagtgtagatcaggtcgatgagtcaccgcgttccccacaggcgaccgtggcggtggctgcgttggcggcctgctcatggggcaacccatgagacgcttcaatactgacatggtgcgaagagtctattgagctaactggtagtcctccggcccctgaatgcggctaatcctaactgcggagcaggcgctcgcaaaccagtgagtagcctgtcgtaacgggtaactctgcagcggaaccgactactttgggtgtccgtgtttccttttattcttatattggctgcttatggtgacaattgagagattgttaccatatagctattggattggccatccggtgtctaacagagcaatcatttacctctttgttggttacgtaccattaaatcttaaggtcgtagcaacgcttaagtttatcctacttctcaacaaagcaaa

SEQ ID NO: 23467 - DNA, 593 bp, synthetic construct
  source 1..593: mol_type = other DNA
ccaactgggtcccgaccaagtacttctgttaccccggactgagtatcaataagctgcttacgtggctgaaggagaaaacgttcgttacccgaccaattacttcgagaaacctagtaacaccatgaaggttgcgcagtgtttcgctcaacacaaccccagtgtagatcaggtcgatgagtcaccgcgttccccacaggcgaccgtggcggtggctgcgttggcggcctgctcatggggcaacccatgagacgcttcaatactgacatggtgcgaagagtctattgagctaactggtagtcctccggcccctgaatgcggctaatcctaactgcggagcaggcgctcgcaaaccagtgagtagcctgtcgtaacgggtaactctgcagcggaaccgactactttgggtgtccgtgtttccttttattcttatattggctgcttatggtgacaattgagagattgttaccatatagctattggattggccatccggtgtctaacagagcaatcatttacctctttgttggttacgtaccattaaatcttaaggtcgtagcaacgcttaagtttatcctacttctcaacaaagcaaa

SEQ ID NO: 23468 - DNA, 543 bp, synthetic construct
  source 1..543: mol_type = other DNA
aagctgcttacgtggctgaaggagaaaacgttcgttacccgaccaattacttcgagaaacctagtaacaccatgaaggttgcgcagtgtttcgctcaacacaaccccagtgtagatcaggtcgatgagtcaccgcgttccccacaggcgaccgtggcggtggctgcgttggcggcctgctcatggggcaacccatgagacgcttcaatactgacatggtgcgaagagtctattgagctaactggtagtcctccggcccctgaatgcggctaatcctaactgcggagcaggcgctcgcaaaccagtgagtagcctgtcgtaacgggtaactctgcagcggaaccgactactttgggtgtccgtgtttccttttattcttatattggctgcttatggtgacaattgagagattgttaccatatagctattggattggccatccggtgtctaacagagcaatcatttacctctttgttggttacgtaccattaaatcttaaggtcgtagcaacgcttaagtttatcctacttctcaacaaagcaaa

SEQ ID NO: 23469 - DNA, 693 bp, synthetic construct
  source 1..693: mol_type = other DNA
cactctggtatcacggtacctttgtgcgcctgttttatatccctttcccttaattggaacttagaagttacacacaccgatcaacagcaggcgtggcatgccagctacgtcttgatcaagcacttctgtttccccggaccgagtatcaatagactgctcacgcggttgaaggagaaagtgttcgttacccggctaactacttcgagaaacccagtagcatcatgaaagttgcgaggtgtttcgctcagcacttccccagtgtagatcaggtcgatgagtcaccgcattccccacgggcgaccgtggcggtggctgcgttggcggcctgcctacggggcaacccgtaggacgcttcaatacagacatggtgcgaagagtcaattgagctagttagtattcctccggcccctgaatgcggctaatcctaactgcggagcacataccctcaatccagggggcattgtgtcgtaacgggtaactctgcagcggaaccgactactttgggtgtccgtgtttccttttgttcttatactggctgcttatggtgacaattgaaagattgttgccatatagctattggattggccatccattgtctaatagagctgttatatacctctttgttggttttgtaccgctcaatctaaaagaagttaagacactacaacttattatacagctgaacacagcaaa

SEQ ID NO: 23470 - DNA, 643 bp, synthetic construct
  source 1..643: mol_type = other DNA
taattggaacttagaagttacacacaccgatcaacagcaggcgtggcatgccagctacgtcttgatcaagcacttctgtttccccggaccgagtatcaatagactgctcacgcggttgaaggagaaagtgttcgttacccggctaactacttcgagaaacccagtagcatcatgaaagttgcgaggtgtttcgctcagcacttccccagtgtagatcaggtcgatgagtcaccgcattccccacgggcgaccgtggcggtggctgcgttggcggcctgcctacggggcaacccgtaggacgcttcaatacagacatggtgcgaagagtcaattgagctagttagtattcctccggcccctgaatgcggctaatcctaactgcggagcacataccctcaatccagggggcattgtgtcgtaacgggtaactctgcagcggaaccgactactttgggtgtccgtgtttccttttgttcttatactggctgcttatggtgacaattgaaagattgttgccatatagctattggattggccatccattgtctaatagagctgttatatacctctttgttggttttgtaccgctcaatctaaaagaagttaagacactacaacttattatacagctgaacacagcaaa

SEQ ID NO: 23471 - DNA, 593 bp, synthetic construct
  source 1..593: mol_type = other DNA
ccagctacgtcttgatcaagcacttctgtttccccggaccgagtatcaatagactgctcacgcggttgaaggagaaagtgttcgttacccggctaactacttcgagaaacccagtagcatcatgaaagttgcgaggtgtttcgctcagcacttccccagtgtagatcaggtcgatgagtcaccgcattccccacgggcgaccgtggcggtggctgcgttggcggcctgcctacggggcaacccgtaggacgcttcaatacagacatggtgcgaagagtcaattgagctagttagtattcctccggcccctgaatgcggctaatcctaactgcggagcacataccctcaatccagggggcattgtgtcgtaacgggtaactctgcagcggaaccgactactttgggtgtccgtgtttccttttgttcttatactggctgcttatggtgacaattgaaagattgttgccatatagctattggattggccatccattgtctaatagagctgttatatacctctttgttggttttgtaccgctcaatctaaaagaagttaagacactacaacttattatacagctgaacacagcaaa

SEQ ID NO: 23472 - DNA, 694 bp, synthetic construct
  source 1..694: mol_type = other DNA
gtctggtcccggaccaccgttactccattcagcttcttcggaacctgttcggaggaattaaacgggcacccatactccccccaccccccttttgtaactaagtatgtgtgctcgtgatcttgactcccacggaacggaccgatccgttggtgaacaaacagctaggtccacatcctcccttcccctgggagggcccccgccctcccacatcctccccccagcctgacgtatcacaggctgtgtgaagcccccgcgaaagctgctcacgtggcaattgtgggtccccccttcatcaagacaccaggtctttcctccttaaggctagccccggcgtgtgaattcacgttgggcaactagtggtgtcactgtgcgctcccaatctcggccgcggagtgctgttccccaagccaaacccctggcccttcactatgtgcctggcaagcatatctgagaaggtgttccgctgtggctgccaacctggtgacaggtgccccagtgtgcgtaaccttcttccgtctccggacggtagtgattggttaagatttggtgtaaggttcatgtgccaacgccctgtgcgggatgaaacctctactgccctaggaatgccaggcaggtaccccacctccgggtgggatctgagcctgggctaattgtctacgggtagtttcatttccaatccttttatgtcggagtc

SEQ ID NO: 23473 - DNA, 644 bp, synthetic construct
  source 1..644: mol_type = other DNA
ggaggaattaaacgggcacccatactccccccaccccccttttgtaactaagtatgtgtgctcgtgatcttgactcccacggaacggaccgatccgttggtgaacaaacagctaggtccacatcctcccttcccctgggagggcccccgccctcccacatcctccccccagcctgacgtatcacaggctgtgtgaagcccccgcgaaagctgctcacgtggcaattgtgggtccccccttcatcaagacaccaggtctttcctccttaaggctagccccggcgtgtgaattcacgttgggcaactagtggtgtcactgtgcgctcccaatctcggccgcggagtgctgttccccaagccaaacccctggcccttcactatgtgcctggcaagcatatctgagaaggtgttccgctgtggctgccaacctggtgacaggtgccccagtgtgcgtaaccttcttccgtctccggacggtagtgattggttaagatttggtgtaaggttcatgtgccaacgccctgtgcgggatgaaacctctactgccctaggaatgccaggcaggtaccccacctccgggtgggatctgagcctgggctaattgtctacgggtagtttcatttccaatccttttatgtcggagtc

SEQ ID NO: 23474 - DNA, 594 bp, synthetic construct
  source 1..594: mol_type = other DNA
agtatgtgtgctcgtgatcttgactcccacggaacggaccgatccgttggtgaacaaacagctaggtccacatcctcccttcccctgggagggcccccgccctcccacatcctccccccagcctgacgtatcacaggctgtgtgaagcccccgcgaaagctgctcacgtggcaattgtgggtccccccttcatcaagacaccaggtctttcctccttaaggctagccccggcgtgtgaattcacgttgggcaactagtggtgtcactgtgcgctcccaatctcggccgcggagtgctgttccccaagccaaacccctggcccttcactatgtgcctggcaagcatatctgagaaggtgttccgctgtggctgccaacctggtgacaggtgccccagtgtgcgtaaccttcttccgtctccggacggtagtgattggttaagatttggtgtaaggttcatgtgccaacgccctgtgcgggatgaaacctctactgccctaggaatgccaggcaggtaccccacctccgggtgggatctgagcctgggctaattgtctacgggtagtttcatttccaatccttttatgtcggagtc

SEQ ID NO: 23475 - DNA, 544 bp, synthetic construct
  source 1..544: mol_type = other DNA
tgaacaaacagctaggtccacatcctcccttcccctgggagggcccccgccctcccacatcctccccccagcctgacgtatcacaggctgtgtgaagcccccgcgaaagctgctcacgtggcaattgtgggtccccccttcatcaagacaccaggtctttcctccttaaggctagccccggcgtgtgaattcacgttgggcaactagtggtgtcactgtgcgctcccaatctcggccgcggagtgctgttccccaagccaaacccctggcccttcactatgtgcctggcaagcatatctgagaaggtgttccgctgtggctgccaacctggtgacaggtgccccagtgtgcgtaaccttcttccgtctccggacggtagtgattggttaagatttggtgtaaggttcatgtgccaacgccctgtgcgggatgaaacctctactgccctaggaatgccaggcaggtaccccacctccgggtgggatctgagcctgggctaattgtctacgggtagtttcatttccaatccttttatgtcggagtc

SEQ ID NO: 23476 - DNA, 694 bp, synthetic construct
  source 1..694: mol_type = other DNA
cactctggtactgaggtacctttgtgcgcctgttttaactcccttcccctgaagtaacttagaagcaataaactaacgatcaacagtgggcatgacataccagtcatgtctcgatcaagcacttctgtttccccggactgagtatcaataggctgctcgcgcggctgaaagagaaaacgttcgttacccggccagctacttcgagaagcttagtaccatcatgaacgaagcagagcgtttcgctcagcacaatcccagtgtagatcaggctgatgagtcactgcgacccccatgggcgaccatggcagtggctgcgttggcggcctgcccatggagaaatccatgggacgctctaattctgacatggtgcgaagagcctattgagctagctggtagtcctccggcccctgaatgcggctaatcctaactgcggagcacgcacccacaaaccagtgggcagtgtgtcgtaacgggtaactctgcagcggaaccgactactttgggtgtccgtgtttccttttattcttatattggctgcttatggtgacaatcaaagagttgttaccatatagctattggattggccatccggtgtgcaacagagcaattgtttacctatttattgggtttgtaccactaacgttgaagtctgtgaccacactcaactttatcctgaacctcaatacagtaaaac

SEQ ID NO: 23477 - DNA, 644 bp, synthetic construct
  source 1..644: mol_type = other DNA
gaagtaacttagaagcaataaactaacgatcaacagtgggcatgacataccagtcatgtctcgatcaagcacttctgtttccccggactgagtatcaataggctgctcgcgcggctgaaagagaaaacgttcgttacccggccagctacttcgagaagcttagtaccatcatgaacgaagcagagcgtttcgctcagcacaatcccagtgtagatcaggctgatgagtcactgcgacccccatgggcgaccatggcagtggctgcgttggcggcctgcccatggagaaatccatgggacgctctaattctgacatggtgcgaagagcctattgagctagctggtagtcctccggcccctgaatgcggctaatcctaactgcggagcacgcacccacaaaccagtgggcagtgtgtcgtaacgggtaactctgcagcggaaccgactactttgggtgtccgtgtttccttttattcttatattggctgcttatggtgacaatcaaagagttgttaccatatagctattggattggccatccggtgtgcaacagagcaattgtttacctatttattgggtttgtaccactaacgttgaagtctgtgaccacactcaactttatcctgaacctcaatacagtaaaac

SEQ ID NO: 23478 - DNA, 594 bp, synthetic construct
  source 1..594: mol_type = other DNA
cagtcatgtctcgatcaagcacttctgtttccccggactgagtatcaataggctgctcgcgcggctgaaagagaaaacgttcgttacccggccagctacttcgagaagcttagtaccatcatgaacgaagcagagcgtttcgctcagcacaatcccagtgtagatcaggctgatgagtcactgcgacccccatgggcgaccatggcagtggctgcgttggcggcctgcccatggagaaatccatgggacgctctaattctgacatggtgcgaagagcctattgagctagctggtagtcctccggcccctgaatgcggctaatcctaactgcggagcacgcacccacaaaccagtgggcagtgtgtcgtaacgggtaactctgcagcggaaccgactactttgggtgtccgtgtttccttttattcttatattggctgcttatggtgacaatcaaagagttgttaccatatagctattggattggccatccggtgtgcaacagagcaattgtttacctatttattgggtttgtaccactaacgttgaagtctgtgaccacactcaactttatcctgaacctcaatacagtaaaac

SEQ ID NO: 23479 - DNA, 544 bp, synthetic construct
  source 1..544: mol_type = other DNA
ggctgctcgcgcggctgaaagagaaaacgttcgttacccggccagctacttcgagaagcttagtaccatcatgaacgaagcagagcgtttcgctcagcacaatcccagtgtagatcaggctgatgagtcactgcgacccccatgggcgaccatggcagtggctgcgttggcggcctgcccatggagaaatccatgggacgctctaattctgacatggtgcgaagagcctattgagctagctggtagtcctccggcccctgaatgcggctaatcctaactgcggagcacgcacccacaaaccagtgggcagtgtgtcgtaacgggtaactctgcagcggaaccgactactttgggtgtccgtgtttccttttattcttatattggctgcttatggtgacaatcaaagagttgttaccatatagctattggattggccatccggtgtgcaacagagcaattgtttacctatttattgggtttgtaccactaacgttgaagtctgtgaccacactcaactttatcctgaacctcaatacagtaaaac

SEQ ID NO: 23480 - DNA, 694 bp, synthetic construct
  source 1..694: mol_type = other DNA
cactctggtacttaggtacctttgtgcgcctgttttatctcccttcccccgaagtaacttagaagctgtgagctaacgatcaacagtaggtgtgacataccagtcatatcttgatcaagcacttctgtttccccggactgagtatcaataggctgctcgcgcggctgaaagagaaaacgttcgtcacccggccaactacttcgagaagcttagtaccaccatgaacgaggcagagtgtttcgctcggcacaaccccagtgtagatcaggctgatgagtcactgcaatccccatgggcgaccatggcagtggctgcgttggcggcctgcccatggagaaatccatgggacgctctaattctgacatggtgcgaagagcctattgagctagctggtagtcctccggcccctgaatgcggctaatcctaactgcggagcacacacccacaagccagtgggcagtgtgtcgtaacgggcaactctgcagcggaaccgactactttgggtgtccgtgtttccttttattcttgtattggctgcttatggtgacaatcaaagagttgttaccatatagctattggattggccatccggtgtgcaacagagcaattatttacctatttattggttttgtaccattgacactgaagtctgtgattacccttaattttattttgaccctcaacacagtcaaac

SEQ ID NO: 23481 - DNA, 644 bp, synthetic construct
  source 1..644: mol_type = other DNA
gaagtaacttagaagctgtgagctaacgatcaacagtaggtgtgacataccagtcatatcttgatcaagcacttctgtttccccggactgagtatcaataggctgctcgcgcggctgaaagagaaaacgttcgtcacccggccaactacttcgagaagcttagtaccaccatgaacgaggcagagtgtttcgctcggcacaaccccagtgtagatcaggctgatgagtcactgcaatccccatgggcgaccatggcagtggctgcgttggcggcctgcccatggagaaatccatgggacgctctaattctgacatggtgcgaagagcctattgagctagctggtagtcctccggcccctgaatgcggctaatcctaactgcggagcacacacccacaagccagtgggcagtgtgtcgtaacgggcaactctgcagcggaaccgactactttgggtgtccgtgtttccttttattcttgtattggctgcttatggtgacaatcaaagagttgttaccatatagctattggattggccatccggtgtgcaacagagcaattatttacctatttattggttttgtaccattgacactgaagtctgtgattacccttaattttattttgaccctcaacacagtcaaac

SEQ ID NO: 23482 - DNA, 594 bp, synthetic construct
  source 1..594: mol_type = other DNA
cagtcatatcttgatcaagcacttctgtttccccggactgagtatcaataggctgctcgcgcggctgaaagagaaaacgttcgtcacccggccaactacttcgagaagcttagtaccaccatgaacgaggcagagtgtttcgctcggcacaaccccagtgtagatcaggctgatgagtcactgcaatccccatgggcgaccatggcagtggctgcgttggcggcctgcccatggagaaatccatgggacgctctaattctgacatggtgcgaagagcctattgagctagctggtagtcctccggcccctgaatgcggctaatcctaactgcggagcacacacccacaagccagtgggcagtgtgtcgtaacgggcaactctgcagcggaaccgactactttgggtgtccgtgtttccttttattcttgtattggctgcttatggtgacaatcaaagagttgttaccatatagctattggattggccatccggtgtgcaacagagcaattatttacctatttattggttttgtaccattgacactgaagtctgtgattacccttaattttattttgaccctcaacacagtcaaac

SEQ ID NO: 23483 - DNA, 544 bp, synthetic construct
  source 1..544: mol_type = other DNA
ggctgctcgcgcggctgaaagagaaaacgttcgtcacccggccaactacttcgagaagcttagtaccaccatgaacgaggcagagtgtttcgctcggcacaaccccagtgtagatcaggctgatgagtcactgcaatccccatgggcgaccatggcagtggctgcgttggcggcctgcccatggagaaatccatgggacgctctaattctgacatggtgcgaagagcctattgagctagctggtagtcctccggcccctgaatgcggctaatcctaactgcggagcacacacccacaagccagtgggcagtgtgtcgtaacgggcaactctgcagcggaaccgactactttgggtgtccgtgtttccttttattcttgtattggctgcttatggtgacaatcaaagagttgttaccatatagctattggattggccatccggtgtgcaacagagcaattatttacctatttattggttttgtaccattgacactgaagtctgtgattacccttaattttattttgaccctcaacacagtcaaac

SEQ ID NO: 23484 - DNA, 694 bp, synthetic construct
  source 1..694: mol_type = other DNA
cactctggtaccgtggtacctttgtgcgcctgttttatacccccttccccgtttgaacattagaagtaacgcacctcgatcagtagcaggcgcggcgcaccagccgtgtcttgatcaagcacttctgtttccccggaccgagtatcaatagactgctcacgcggttgaaggagaaaacgttcgttatccggctaactacttcgagaaacttagtagcaccatggaagttgcagagtgtttcgctcagcactccccccccagtgtagatcaggctgatggatcaccgcgttcctcacgggtgaccgtggcggtggtcgcgttggcggcctgcccatggggcaacccatgggacgctctaatatggacatggtgtgaagagtctattgagctagttagtagtcctccggcccctgaatgcggctaatcctaactgcggagcacgtgtccccaacccaggggatagcgtgtcgtaacgggtaactctgcagcggaaccgactactttgggtgtccgtgtttcctttattcttatcctggctgcttatggtgacaattgagagattgttaccatatagctattggattggccatccggtgtctaacagagctataatatatctttttgttgggttcgtacccctcaattttgaggttgttctcacattaaagtacatcttggtgttaaatatcagaag

SEQ ID NO: 23485 - DNA, 644 bp, synthetic construct
  source 1..644: mol_type = other DNA
gtttgaacattagaagtaacgcacctcgatcagtagcaggcgcggcgcaccagccgtgtcttgatcaagcacttctgtttccccggaccgagtatcaatagactgctcacgcggttgaaggagaaaacgttcgttatccggctaactacttcgagaaacttagtagcaccatggaagttgcagagtgtttcgctcagcactccccccccagtgtagatcaggctgatggatcaccgcgttcctcacgggtgaccgtggcggtggtcgcgttggcggcctgcccatggggcaacccatgggacgctctaatatggacatggtgtgaagagtctattgagctagttagtagtcctccggcccctgaatgcggctaatcctaactgcggagcacgtgtccccaacccaggggatagcgtgtcgtaacgggtaactctgcagcggaaccgactactttgggtgtccgtgtttcctttattcttatcctggctgcttatggtgacaattgagagattgttaccatatagctattggattggccatccggtgtctaacagagctataatatatctttttgttgggttcgtacccctcaattttgaggttgttctcacattaaagtacatcttggtgttaaatatcagaag

SEQ ID NO: 23486 - DNA, 594 bp, synthetic construct
  source 1..594: mol_type = other DNA
cagccgtgtcttgatcaagcacttctgtttccccggaccgagtatcaatagactgctcacgcggttgaaggagaaaacgttcgttatccggctaactacttcgagaaacttagtagcaccatggaagttgcagagtgtttcgctcagcactccccccccagtgtagatcaggctgatggatcaccgcgttcctcacgggtgaccgtggcggtggtcgcgttggcggcctgcccatggggcaacccatgggacgctctaatatggacatggtgtgaagagtctattgagctagttagtagtcctccggcccctgaatgcggctaatcctaactgcggagcacgtgtccccaacccaggggatagcgtgtcgtaacgggtaactctgcagcggaaccgactactttgggtgtccgtgtttcctttattcttatcctggctgcttatggtgacaattgagagattgttaccatatagctattggattggccatccggtgtctaacagagctataatatatctttttgttgggttcgtacccctcaattttgaggttgttctcacattaaagtacatcttggtgttaaatatcagaag

SEQ ID NO: 23487 - DNA, 544 bp, synthetic construct
  source 1..544: mol_type = other DNA
gactgctcacgcggttgaaggagaaaacgttcgttatccggctaactacttcgagaaacttagtagcaccatggaagttgcagagtgtttcgctcagcactccccccccagtgtagatcaggctgatggatcaccgcgttcctcacgggtgaccgtggcggtggtcgcgttggcggcctgcccatggggcaacccatgggacgctctaatatggacatggtgtgaagagtctattgagctagttagtagtcctccggcccctgaatgcggctaatcctaactgcggagcacgtgtccccaacccaggggatagcgtgtcgtaacgggtaactctgcagcggaaccgactactttgggtgtccgtgtttcctttattcttatcctggctgcttatggtgacaattgagagattgttaccatatagctattggattggccatccggtgtctaacagagctataatatatctttttgttgggttcgtacccctcaattttgaggttgttctcacattaaagtacatcttggtgttaaatatcagaag

SEQ ID NO: 23488 - DNA, 694 bp, synthetic construct
  source 1..694: mol_type = other DNA
cacactgattttgcgggatctttgtgcgcctgttttataacccctccctaaacggcaatttagaagttctgcacatccacgaccagtagtaagcgtgacgcgccagtcacgtcttggtcaagtacttctgtatccccggactgagtatcaatagactgctcacgcggttgaaggagaaaacgttcgttatccggctaactacttcgagaaacctagtaacaccgtgaaagttgcggagtgtttcgctcagcacttcccccgtgtagatcaggccgatgagtcactgtaaaccccacgggcgaccgtgacagtggctgcgttggcggcctgcccatgaggcaactcatgggacgctctaatacagacatggtgtgaagagtctattgagctagttagtagtcctccggcccctgaatgcggctaatcctaactgcggagcacgcaccctcaacccagggggcggcgtgtcgtaatgggtaactctgcagcggaaccgactactttgggtgtccgtgtttccttttattccttattggctgcttatggtgacaattgaaaagttgttaccatatagctattggattggccatccggtatctaatagagctattgtttacctgttcattggatacgtccctcttagtcttaaggtcattcaaactcttgattacatattactccttaaccacaagaa

SEQ ID NO: 23489 - DNA, 644 bp, synthetic construct
  source 1..644: mol_type = other DNA
aacggcaatttagaagttctgcacatccacgaccagtagtaagcgtgacgcgccagtcacgtcttggtcaagtacttctgtatccccggactgagtatcaatagactgctcacgcggttgaaggagaaaacgttcgttatccggctaactacttcgagaaacctagtaacaccgtgaaagttgcggagtgtttcgctcagcacttcccccgtgtagatcaggccgatgagtcactgtaaaccccacgggcgaccgtgacagtggctgcgttggcggcctgcccatgaggcaactcatgggacgctctaatacagacatggtgtgaagagtctattgagctagttagtagtcctccggcccctgaatgcggctaatcctaactgcggagcacgcaccctcaacccagggggcggcgtgtcgtaatgggtaactctgcagcggaaccgactactttgggtgtccgtgtttccttttattccttattggctgcttatggtgacaattgaaaagttgttaccatatagctattggattggccatccggtatctaatagagctattgtttacctgttcattggatacgtccctcttagtcttaaggtcattcaaactcttgattacatattactccttaaccacaagaa

SEQ ID NO: 23490 - DNA, 594 bp, synthetic construct
  source 1..594: mol_type = other DNA
cgccagtcacgtcttggtcaagtacttctgtatccccggactgagtatcaatagactgctcacgcggttgaaggagaaaacgttcgttatccggctaactacttcgagaaacctagtaacaccgtgaaagttgcggagtgtttcgctcagcacttcccccgtgtagatcaggccgatgagtcactgtaaaccccacgggcgaccgtgacagtggctgcgttggcggcctgcccatgaggcaactcatgggacgctctaatacagacatggtgtgaagagtctattgagctagttagtagtcctccggcccctgaatgcggctaatcctaactgcggagcacgcaccctcaacccagggggcggcgtgtcgtaatgggtaactctgcagcggaaccgactactttgggtgtccgtgtttccttttattccttattggctgcttatggtgacaattgaaaagttgttaccatatagctattggattggccatccggtatctaatagagctattgtttacctgttcattggatacgtccctcttagtcttaaggtcattcaaactcttgattacatattactccttaaccacaagaa

SEQ ID NO: 23491 - DNA, 544 bp, synthetic construct
  source 1..544: mol_type = other DNA
atagactgctcacgcggttgaaggagaaaacgttcgttatccggctaactacttcgagaaacctagtaacaccgtgaaagttgcggagtgtttcgctcagcacttcccccgtgtagatcaggccgatgagtcactgtaaaccccacgggcgaccgtgacagtggctgcgttggcggcctgcccatgaggcaactcatgggacgctctaatacagacatggtgtgaagagtctattgagctagttagtagtcctccggcccctgaatgcggctaatcctaactgcggagcacgcaccctcaacccagggggcggcgtgtcgtaatgggtaactctgcagcggaaccgactactttgggtgtccgtgtttccttttattccttattggctgcttatggtgacaattgaaaagttgttaccatatagctattggattggccatccggtatctaatagagctattgtttacctgttcattggatacgtccctcttagtcttaaggtcattcaaactcttgattacatattactccttaaccacaagaa

SEQ ID NO: 23492 - DNA, 694 bp, synthetic construct
  source 1..694: mol_type = other DNA
cactctggcactaaggtacctttgtgcgcctgtttttacttccctttcccaaagaaacttagaagttgtgtaccaatgatcaatagcaggtgtgacgtacaaataacatcttgatcaatcacttctgtttccccggaccgagtatcaataggctgctcgcgcggctgaaggagaaaacgttcgttacccgaccagctatttcgagaagcttagtaccaccatgaacgaggcagagtgtttcgttcagcacaaccccagtgtagatcaggctgatgagtcactgcaacccccatgggcgaccatggcagtggctgcgttggcggcctgcccatggagaaatccatgggacgctctaattctgacatggtgtgaagagcctattgagctagctggtagtcctccggcccctgaatgcggctaatcctaactgcggagcacatgctcacgagccagtgggtggtgtgtcgtaatgggcaactctgcagcggaaccgactactttgggtgtccgtgtttccttttattcttatgttggctgcttatggtgacaatcaaagaattgttaccatatagctattggattggccatccggtgtgcaacagagcaattgtttatctatttattggtttcgtaccactatcactgaagtctgtgaccactctcgaattcattttgaccctcaactcaatcaaac

SEQ ID NO: 23493 - DNA, 644 bp, synthetic construct
  source 1..644: mol_type = other DNA
aaagaaacttagaagttgtgtaccaatgatcaatagcaggtgtgacgtacaaataacatcttgatcaatcacttctgtttccccggaccgagtatcaataggctgctcgcgcggctgaaggagaaaacgttcgttacccgaccagctatttcgagaagcttagtaccaccatgaacgaggcagagtgtttcgttcagcacaaccccagtgtagatcaggctgatgagtcactgcaacccccatgggcgaccatggcagtggctgcgttggcggcctgcccatggagaaatccatgggacgctctaattctgacatggtgtgaagagcctattgagctagctggtagtcctccggcccctgaatgcggctaatcctaactgcggagcacatgctcacgagccagtgggtggtgtgtcgtaatgggcaactctgcagcggaaccgactactttgggtgtccgtgtttccttttattcttatgttggctgcttatggtgacaatcaaagaattgttaccatatagctattggattggccatccggtgtgcaacagagcaattgtttatctatttattggtttcgtaccactatcactgaagtctgtgaccactctcgaattcattttgaccctcaactcaatcaaac

SEQ ID NO: 23494 - DNA, 594 bp, synthetic construct
  source 1..594: mol_type = other DNA
aaataacatcttgatcaatcacttctgtttccccggaccgagtatcaataggctgctcgcgcggctgaaggagaaaacgttcgttacccgaccagctatttcgagaagcttagtaccaccatgaacgaggcagagtgtttcgttcagcacaaccccagtgtagatcaggctgatgagtcactgcaacccccatgggcgaccatggcagtggctgcgttggcggcctgcccatggagaaatccatgggacgctctaattctgacatggtgtgaagagcctattgagctagctggtagtcctccggcccctgaatgcggctaatcctaactgcggagcacatgctcacgagccagtgggtggtgtgtcgtaatgggcaactctgcagcggaaccgactactttgggtgtccgtgtttccttttattcttatgttggctgcttatggtgacaatcaaagaattgttaccatatagctattggattggccatccggtgtgcaacagagcaattgtttatctatttattggtttcgtaccactatcactgaagtctgtgaccactctcgaattcattttgaccctcaactcaatcaaac

SEQ ID NO: 23495 - DNA, 544 bp, synthetic construct
  source 1..544: mol_type = other DNA
ggctgctcgcgcggctgaaggagaaaacgttcgttacccgaccagctatttcgagaagcttagtaccaccatgaacgaggcagagtgtttcgttcagcacaaccccagtgtagatcaggctgatgagtcactgcaacccccatgggcgaccatggcagtggctgcgttggcggcctgcccatggagaaatccatgggacgctctaattctgacatggtgtgaagagcctattgagctagctggtagtcctccggcccctgaatgcggctaatcctaactgcggagcacatgctcacgagccagtgggtggtgtgtcgtaatgggcaactctgcagcggaaccgactactttgggtgtccgtgtttccttttattcttatgttggctgcttatggtgacaatcaaagaattgttaccatatagctattggattggccatccggtgtgcaacagagcaattgtttatctatttattggtttcgtaccactatcactgaagtctgtgaccactctcgaattcattttgaccctcaactcaatcaaac

SEQ ID NO: 23496 - DNA, 694 bp, synthetic construct
  source 1..694: mol_type = other DNA
gtacaccggtatcacggtacccttgtacgcctgttttatactccctaccccgtaacttagaagcatcaactcaagttcaatagtaggggtacaatccagtaccaccacgaacaagcacttctgtttccccggtgatattgtatagactgtgcccacggttgaagacaatagatccgttatccgcttttatacttcgagaagcccagtaccaccttggaatcttcgatgcgttgcgatcagcactcgaacccggagtgtagcttaggtcgatgagtctggacgctcctcaccggcgacggtggtccagactgcgttggcggcctacctgtggcccaaagtcacaggacgctagttgtgaacaaggtgtgaagagcctattgagctataaaagagtcctccggcccctgaatgcggctaatcccaaccacggagcaggtgatcacaaaccagtgactagcctgtcgtaacgcgcaagtctgtggcggaaccgactactttgggtgtccgtgtttccttttatttcatttatggctgcttatggtgacaatcatagattgttatcataaagcgaattggattggccatccggtgaaaatcaagcacatcatttatctgtttgttggatttacacctttagtttcttactccccgcgccttattcatattgtgttgttgattagacagtggtattacc

SEQ ID NO: 23497 - DNA, 644 bp, synthetic construct
  source 1..644: mol_type = other DNA
cgtaacttagaagcatcaactcaagttcaatagtaggggtacaatccagtaccaccacgaacaagcacttctgtttccccggtgatattgtatagactgtgcccacggttgaagacaatagatccgttatccgcttttatacttcgagaagcccagtaccaccttggaatcttcgatgcgttgcgatcagcactcgaacccggagtgtagcttaggtcgatgagtctggacgctcctcaccggcgacggtggtccagactgcgttggcggcctacctgtggcccaaagtcacaggacgctagttgtgaacaaggtgtgaagagcctattgagctataaaagagtcctccggcccctgaatgcggctaatcccaaccacggagcaggtgatcacaaaccagtgactagcctgtcgtaacgcgcaagtctgtggcggaaccgactactttgggtgtccgtgtttccttttatttcatttatggctgcttatggtgacaatcatagattgttatcataaagcgaattggattggccatccggtgaaaatcaagcacatcatttatctgtttgttggatttacacctttagtttcttactccccgcgccttattcatattgtgttgttgattagacagtggtattacc

SEQ ID NO: 23498 - DNA, 594 bp, synthetic construct
  source 1..594: mol_type = other DNA
accaccacgaacaagcacttctgtttccccggtgatattgtatagactgtgcccacggttgaagacaatagatccgttatccgcttttatacttcgagaagcccagtaccaccttggaatcttcgatgcgttgcgatcagcactcgaacccggagtgtagcttaggtcgatgagtctggacgctcctcaccggcgacggtggtccagactgcgttggcggcctacctgtggcccaaagtcacaggacgctagttgtgaacaaggtgtgaagagcctattgagctataaaagagtcctccggcccctgaatgcggctaatcccaaccacggagcaggtgatcacaaaccagtgactagcctgtcgtaacgcgcaagtctgtggcggaaccgactactttgggtgtccgtgtttccttttatttcatttatggctgcttatggtgacaatcatagattgttatcataaagcgaattggattggccatccggtgaaaatcaagcacatcatttatctgtttgttggatttacacctttagtttcttactccccgcgccttattcatattgtgttgttgattagacagtggtattacc

SEQ ID NO: 23499 - DNA, 544 bp, synthetic construct
  source 1..544: mol_type = other DNA
gcccacggttgaagacaatagatccgttatccgcttttatacttcgagaagcccagtaccaccttggaatcttcgatgcgttgcgatcagcactcgaacccggagtgtagcttaggtcgatgagtctggacgctcctcaccggcgacggtggtccagactgcgttggcggcctacctgtggcccaaagtcacaggacgctagttgtgaacaaggtgtgaagagcctattgagctataaaagagtcctccggcccctgaatgcggctaatcccaaccacggagcaggtgatcacaaaccagtgactagcctgtcgtaacgcgcaagtctgtggcggaaccgactactttgggtgtccgtgtttccttttatttcatttatggctgcttatggtgacaatcatagattgttatcataaagcgaattggattggccatccggtgaaaatcaagcacatcatttatctgtttgttggatttacacctttagtttcttactccccgcgccttattcatattgtgttgttgattagacagtggtattacc

SEQ ID NO: 23500 - DNA, 694 bp, synthetic construct
  source 1..694: mol_type = other DNA
gtacaccggtatcacggtacccttgtacgcctgttttatactccccgcccgtaacttagaagcaataactcaagttcaacagcagggggtacaaaccagtacctccacgaacaagcacttctgtttccccggtgacattgtatagactgtacccacggttgaaaacaatagatccgttatccgcttttgtacttcgagaagcccagtaccgtcttggaatcttcgatgcgttgcgctcagcactcgaacccggagtgtagcttaggtcgatgagtctggacagtcctcaccggcgacggtggtccaggctgcgttggcggcctacctgtggcccaaagccacaggacgctagttgtgaacaaggtgcgaagagcctattgagctacagaagagtcctccggcccctgaatgcggctaatcccaaccatggagcaggtgatcacgaaccagtgattagcctgtcgtaatgcgcaagtctgtggcggaaccgactactttgggtgtccgtgtttccttttatttcatttatggctgcttatggtgacaatcatagattgttgtcataaagcgaattggattggccatccggtgaaagtcaaacacattgtttatttgtttgttggcttcacgcctttaacttatcacaccttaaacctcattcacattaccttgttgatcagacagtggtatcacc

SEQ ID NO: 23501 - DNA, 644 bp, synthetic construct
  source 1..644: mol_type = other DNA
gtaacttagaagcaataactcaagttcaacagcagggggtacaaaccagtacctccacgaacaagcacttctgtttccccggtgacattgtatagactgtacccacggttgaaaacaatagatccgttatccgcttttgtacttcgagaagcccagtaccgtcttggaatcttcgatgcgttgcgctcagcactcgaacccggagtgtagcttaggtcgatgagtctggacagtcctcaccggcgacggtggtccaggctgcgttggcggcctacctgtggcccaaagccacaggacgctagttgtgaacaaggtgcgaagagcctattgagctacagaagagtcctccggcccctgaatgcggctaatcccaaccatggagcaggtgatcacgaaccagtgattagcctgtcgtaatgcgcaagtctgtggcggaaccgactactttgggtgtccgtgtttccttttatttcatttatggctgcttatggtgacaatcatagattgttgtcataaagcgaattggattggccatccggtgaaagtcaaacacattgtttatttgtttgttggcttcacgcctttaacttatcacaccttaaacctcattcacattaccttgttgatcagacagtggtatcacc

SEQ ID NO: 23502 - DNA, 594 bp, synthetic construct
  source 1..594: mol_type = other DNA
acctccacgaacaagcacttctgtttccccggtgacattgtatagactgtacccacggttgaaaacaatagatccgttatccgcttttgtacttcgagaagcccagtaccgtcttggaatcttcgatgcgttgcgctcagcactcgaacccggagtgtagcttaggtcgatgagtctggacagtcctcaccggcgacggtggtccaggctgcgttggcggcctacctgtggcccaaagccacaggacgctagttgtgaacaaggtgcgaagagcctattgagctacagaagagtcctccggcccctgaatgcggctaatcccaaccatggagcaggtgatcacgaaccagtgattagcctgtcgtaatgcgcaagtctgtggcggaaccgactactttgggtgtccgtgtttccttttatttcatttatggctgcttatggtgacaatcatagattgttgtcataaagcgaattggattggccatccggtgaaagtcaaacacattgtttatttgtttgttggcttcacgcctttaacttatcacaccttaaacctcattcacattaccttgttgatcagacagtggtatcacc

SEQ ID NO: 23503 - DNA, 544 bp, synthetic construct
  source 1..544: mol_type = other DNA
acccacggttgaaaacaatagatccgttatccgcttttgtacttcgagaagcccagtaccgtcttggaatcttcgatgcgttgcgctcagcactcgaacccggagtgtagcttaggtcgatgagtctggacagtcctcaccggcgacggtggtccaggctgcgttggcggcctacctgtggcccaaagccacaggacgctagttgtgaacaaggtgcgaagagcctattgagctacagaagagtcctccggcccctgaatgcggctaatcccaaccatggagcaggtgatcacgaaccagtgattagcctgtcgtaatgcgcaagtctgtggcggaaccgactactttgggtgtccgtgtttccttttatttcatttatggctgcttatggtgacaatcatagattgttgtcataaagcgaattggattggccatccggtgaaagtcaaacacattgtttatttgtttgttggcttcacgcctttaacttatcacaccttaaacctcattcacattaccttgttgatcagacagtggtatcacc

SEQ ID NO: 23504 - DNA, 694 bp, synthetic construct
  source 1..694: mol_type = other DNA
gtactccggtattgcggtacccttgtacgcctgttttacactcccttccccgtaacttagacgcaataaaccaagttcactaggaggggtgcaaaccagcaccaccacgaacaagcacttctgtttccccggtgacattgtatagactgtatccacggttgaaaacgattgatccgttatccgctcttgtacttcgagaagcctagtatcatcttggaatcttcgacgcgttgcgctcagcattcaaccccagaatgtagcttaggtcgatgagtctggacattcctcaccggtgacggtggtccaggctgcgttggcggcctacctgtgacccaaagtcacaggacgctagttgtgaacaaggtgtgaagagcctattgagctacaagagagtcctccggcccctgaatgcggctaatcctaaccacggagcaagtgctcacgaaccagtgagtggcttgtcgtaacgagcaattctgtggcggaaccgactactttgggtgtccgtgtttcctttttaactttaaatggctgcttatggtgacaatcattgattgttatcataagccgaattggattggccatccggtgaaaatcaagttgatcatttatttgtttgttggattcactccattaactcatttttcaattgacctaatacgtattgtattattagttagaaacatacatcaca

SEQ ID NO: 23505 - DNA, 644 bp, synthetic construct
  source 1..644: mol_type = other DNA
cgtaacttagacgcaataaaccaagttcactaggaggggtgcaaaccagcaccaccacgaacaagcacttctgtttccccggtgacattgtatagactgtatccacggttgaaaacgattgatccgttatccgctcttgtacttcgagaagcctagtatcatcttggaatcttcgacgcgttgcgctcagcattcaaccccagaatgtagcttaggtcgatgagtctggacattcctcaccggtgacggtggtccaggctgcgttggcggcctacctgtgacccaaagtcacaggacgctagttgtgaacaaggtgtgaagagcctattgagctacaagagagtcctccggcccctgaatgcggctaatcctaaccacggagcaagtgctcacgaaccagtgagtggcttgtcgtaacgagcaattctgtggcggaaccgactactttgggtgtccgtgtttcctttttaactttaaatggctgcttatggtgacaatcattgattgttatcataagccgaattggattggccatccggtgaaaatcaagttgatcatttatttgtttgttggattcactccattaactcatttttcaattgacctaatacgtattgtattattagttagaaacatacatcaca

SEQ ID NO: 23506 - DNA, 594 bp, synthetic construct
  source 1..594: mol_type = other DNA
accaccacgaacaagcacttctgtttccccggtgacattgtatagactgtatccacggttgaaaacgattgatccgttatccgctcttgtacttcgagaagcctagtatcatcttggaatcttcgacgcgttgcgctcagcattcaaccccagaatgtagcttaggtcgatgagtctggacattcctcaccggtgacggtggtccaggctgcgttggcggcctacctgtgacccaaagtcacaggacgctagttgtgaacaaggtgtgaagagcctattgagctacaagagagtcctccggcccctgaatgcggctaatcctaaccacggagcaagtgctcacgaaccagtgagtggcttgtcgtaacgagcaattctgtggcggaaccgactactttgggtgtccgtgtttcctttttaactttaaatggctgcttatggtgacaatcattgattgttatcataagccgaattggattggccatccggtgaaaatcaagttgatcatttatttgtttgttggattcactccattaactcatttttcaattgacctaatacgtattgtattattagttagaaacatacatcaca

SEQ ID NO: 23507 - DNA, 544 bp, synthetic construct
  source 1..544: mol_type = other DNA
atccacggttgaaaacgattgatccgttatccgctcttgtacttcgagaagcctagtatcatcttggaatcttcgacgcgttgcgctcagcattcaaccccagaatgtagcttaggtcgatgagtctggacattcctcaccggtgacggtggtccaggctgcgttggcggcctacctgtgacccaaagtcacaggacgctagttgtgaacaaggtgtgaagagcctattgagctacaagagagtcctccggcccctgaatgcggctaatcctaaccacggagcaagtgctcacgaaccagtgagtggcttgtcgtaacgagcaattctgtggcggaaccgactactttgggtgtccgtgtttcctttttaactttaaatggctgcttatggtgacaatcattgattgttatcataagccgaattggattggccatccggtgaaaatcaagttgatcatttatttgtttgttggattcactccattaactcatttttcaattgacctaatacgtattgtattattagttagaaacatacatcaca

SEQ ID NO: 23508 - DNA, 694 bp, synthetic construct
  source 1..694: mol_type = other DNA
gtacaccggtatcacggtacccttgtacgcctgttttatactcccttccccgtaacttagaagccacaaaccaagttcgataggagggggtacaaaccagtaccaccgtgaacaagcacttctgtttccccggtgatgtcacatagactgtccccacggttgaaagtgattgatccgttacccgccttggtacttcgagaaacctagtatcatcttggaatcaatgacgcgttgcgctcagcactcaaacccggagtgtagcttaggctgatgagtctggacgtccctcactggcgacagtggtccaggctgcgctggcggcctacctgtggtggaagccacaggacgctaattgtgaacaaggtgtgaagagtctattgagctaccatggagtcctccggcccctgaatgcggctaatcccaaccacggagcaagtattcacaaaccagtgaaatgcttgtcgtaacgcgaaagtctgtggcggaaccgactactttgggtgtccgtgtttccttttattctttatatggctgcttatggtgacaatcatagattgttatcataaagcgcattggattggccatccggtgaaaatcaagcaaatcatttacttatttgttggatttactccaatcacaccatttacattgcatttaattactcttgtgttgacaatcagaagatactaccaca

SEQ ID NO: 23509 - DNA, 644 bp, synthetic construct
  source 1..644: mol_type = other DNA
cgtaacttagaagccacaaaccaagttcgataggagggggtacaaaccagtaccaccgtgaacaagcacttctgtttccccggtgatgtcacatagactgtccccacggttgaaagtgattgatccgttacccgccttggtacttcgagaaacctagtatcatcttggaatcaatgacgcgttgcgctcagcactcaaacccggagtgtagcttaggctgatgagtctggacgtccctcactggcgacagtggtccaggctgcgctggcggcctacctgtggtggaagccacaggacgctaattgtgaacaaggtgtgaagagtctattgagctaccatggagtcctccggcccctgaatgcggctaatcccaaccacggagcaagtattcacaaaccagtgaaatgcttgtcgtaacgcgaaagtctgtggcggaaccgactactttgggtgtccgtgtttccttttattctttatatggctgcttatggtgacaatcatagattgttatcataaagcgcattggattggccatccggtgaaaatcaagcaaatcatttacttatttgttggatttactccaatcacaccatttacattgcatttaattactcttgtgttgacaatcagaagatactaccaca

SEQ ID NO: 23510 - DNA, 594 bp, synthetic construct
  source 1..594: mol_type = other DNA
taccaccgtgaacaagcacttctgtttccccggtgatgtcacatagactgtccccacggttgaaagtgattgatccgttacccgccttggtacttcgagaaacctagtatcatcttggaatcaatgacgcgttgcgctcagcactcaaacccggagtgtagcttaggctgatgagtctggacgtccctcactggcgacagtggtccaggctgcgctggcggcctacctgtggtggaagccacaggacgctaattgtgaacaaggtgtgaagagtctattgagctaccatggagtcctccggcccctgaatgcggctaatcccaaccacggagcaagtattcacaaaccagtgaaatgcttgtcgtaacgcgaaagtctgtggcggaaccgactactttgggtgtccgtgtttccttttattctttatatggctgcttatggtgacaatcatagattgttatcataaagcgcattggattggccatccggtgaaaatcaagcaaatcatttacttatttgttggatttactccaatcacaccatttacattgcatttaattactcttgtgttgacaatcagaagatactaccaca

SEQ ID NO: 23511 - DNA, 544 bp, synthetic construct
  source 1..544: mol_type = other DNA
tccccacggttgaaagtgattgatccgttacccgccttggtacttcgagaaacctagtatcatcttggaatcaatgacgcgttgcgctcagcactcaaacccggagtgtagcttaggctgatgagtctggacgtccctcactggcgacagtggtccaggctgcgctggcggcctacctgtggtggaagccacaggacgctaattgtgaacaaggtgtgaagagtctattgagctaccatggagtcctccggcccctgaatgcggctaatcccaaccacggagcaagtattcacaaaccagtgaaatgcttgtcgtaacgcgaaagtctgtggcggaaccgactactttgggtgtccgtgtttccttttattctttatatggctgcttatggtgacaatcatagattgttatcataaagcgcattggattggccatccggtgaaaatcaagcaaatcatttacttatttgttggatttactccaatcacaccatttacattgcatttaattactcttgtgttgacaatcagaagatactaccaca

SEQ ID NO: 23512 - DNA, 694 bp, synthetic construct
  source 1..694: mol_type = other DNA
gtactctggtatcacggtacctttgtacgcctgttttataccccttccccaagtaaccttagaagcaactcaacaagttcaatagagggggtacaaaccagtaccaccacgaacaagcacttctgtttccccggtgattttgcataggctgtacccacggccaaaagtgaatgatccgttatccgcttgagtacttcgagaagcttagtaccaccttggaatcttcgatgcgttgcgctcagcactctaccccgagtgtagcttaggctgatgagtctgggcattccccaccggcgacggtggcccaggctgcgttggcggcctacccatggctaacgccatgggacgctagttgtgaacaaggtgtgaagagcctattgagctactcaagagtcctccggcccctgaatgcggctaatcctaaccatggagcaagtgccctcaacccagagggtggcttgtcgtaacgcgcaagtccgtggcggaaccgactactttgggtgtccgtgtttccttttatcttatatatggctgcttatggtgacaatcatagattgttatcataaagcgaattggattggccatccggtgaagtataaacatattatttacctgtttgtcggattcaccccgctcactttatacacacccaatatagtatctattgtactgctactgaggcactaccaccgca

SEQ ID NO: 23513 - DNA, 644 bp, synthetic construct
  source 1..644: mol_type = other DNA
aagtaaccttagaagcaactcaacaagttcaatagagggggtacaaaccagtaccaccacgaacaagcacttctgtttccccggtgattttgcataggctgtacccacggccaaaagtgaatgatccgttatccgcttgagtacttcgagaagcttagtaccaccttggaatcttcgatgcgttgcgctcagcactctaccccgagtgtagcttaggctgatgagtctgggcattccccaccggcgacggtggcccaggctgcgttggcggcctacccatggctaacgccatgggacgctagttgtgaacaaggtgtgaagagcctattgagctactcaagagtcctccggcccctgaatgcggctaatcctaaccatggagcaagtgccctcaacccagagggtggcttgtcgtaacgcgcaagtccgtggcggaaccgactactttgggtgtccgtgtttccttttatcttatatatggctgcttatggtgacaatcatagattgttatcataaagcgaattggattggccatccggtgaagtataaacatattatttacctgtttgtcggattcaccccgctcactttatacacacccaatatagtatctattgtactgctactgaggcactaccaccgca

SEQ ID NO: 23514 - DNA, 594 bp, synthetic construct
  source 1..594: mol_type = other DNA
gtaccaccacgaacaagcacttctgtttccccggtgattttgcataggctgtacccacggccaaaagtgaatgatccgttatccgcttgagtacttcgagaagcttagtaccaccttggaatcttcgatgcgttgcgctcagcactctaccccgagtgtagcttaggctgatgagtctgggcattccccaccggcgacggtggcccaggctgcgttggcggcctacccatggctaacgccatgggacgctagttgtgaacaaggtgtgaagagcctattgagctactcaagagtcctccggcccctgaatgcggctaatcctaaccatggagcaagtgccctcaacccagagggtggcttgtcgtaacgcgcaagtccgtggcggaaccgactactttgggtgtccgtgtttccttttatcttatatatggctgcttatggtgacaatcatagattgttatcataaagcgaattggattggccatccggtgaagtataaacatattatttacctgtttgtcggattcaccccgctcactttatacacacccaatatagtatctattgtactgctactgaggcactaccaccgca

SEQ ID NO: 23515 - DNA, 544 bp, synthetic construct
  source 1..544: mol_type = other DNA
gtacccacggccaaaagtgaatgatccgttatccgcttgagtacttcgagaagcttagtaccaccttggaatcttcgatgcgttgcgctcagcactctaccccgagtgtagcttaggctgatgagtctgggcattccccaccggcgacggtggcccaggctgcgttggcggcctacccatggctaacgccatgggacgctagttgtgaacaaggtgtgaagagcctattgagctactcaagagtcctccggcccctgaatgcggctaatcctaaccatggagcaagtgccctcaacccagagggtggcttgtcgtaacgcgcaagtccgtggcggaaccgactactttgggtgtccgtgtttccttttatcttatatatggctgcttatggtgacaatcatagattgttatcataaagcgaattggattggccatccggtgaagtataaacatattatttacctgtttgtcggattcaccccgctcactttatacacacccaatatagtatctattgtactgctactgaggcactaccaccgca

SEQ ID NO: 23516 - DNA, 694 bp, synthetic construct
  source 1..694: mol_type = other DNA
actctggtattatggtaccttagtgcgcctgttttatacaccccttccccaaatgtaatttagatgcatgtaaacaaaggccaatagcaggcgcagcataccagctgtgtctcggtcaagcacttctgttaccccggactgagtatcaataggctactcacgtggctgaaggagaaaacgttcgttatccggccaattacttcgagaaacctagtaataccatgaaggttgcgaagtgtttcgctcagcacaaccccagtgtagatcaggtcgatgagtcaccgcattccccacgggtgaccgtggcggtggctgcgctggcggcctgcccatgggattacccatgggacgcttcaatattgacatggtgtgaagagtctattgagctaattggtattcctccggcccctgaatgcggctaatcccaactgcggagcaggtacccacatgccagtgggcagcctgtcgtaatgggcaactctgcagcggaaccgactactttgggtgtccgtgtttctctttattcttatactggctgcttatggtgacaattgagaaattgttgccatatagctattggattggccatccggtgacaaatagagcaattgtgcatccatttgttggttttatactaactcaatctcaaagttttaactaccctcaatctcattatatcattcaatacagcaaa

SEQ ID NO: 23517 - DNA, 644 bp, synthetic construct
  source 1..644: mol_type = other DNA
aaatgtaatttagatgcatgtaaacaaaggccaatagcaggcgcagcataccagctgtgtctcggtcaagcacttctgttaccccggactgagtatcaataggctactcacgtggctgaaggagaaaacgttcgttatccggccaattacttcgagaaacctagtaataccatgaaggttgcgaagtgtttcgctcagcacaaccccagtgtagatcaggtcgatgagtcaccgcattccccacgggtgaccgtggcggtggctgcgctggcggcctgcccatgggattacccatgggacgcttcaatattgacatggtgtgaagagtctattgagctaattggtattcctccggcccctgaatgcggctaatcccaactgcggagcaggtacccacatgccagtgggcagcctgtcgtaatgggcaactctgcagcggaaccgactactttgggtgtccgtgtttctctttattcttatactggctgcttatggtgacaattgagaaattgttgccatatagctattggattggccatccggtgacaaatagagcaattgtgcatccatttgttggttttatactaactcaatctcaaagttttaactaccctcaatctcattatatcattcaatacagcaaa

SEQ ID NO: 23518 - DNA, 594 bp, synthetic construct
  source 1..594: mol_type = other DNA
ccagctgtgtctcggtcaagcacttctgttaccccggactgagtatcaataggctactcacgtggctgaaggagaaaacgttcgttatccggccaattacttcgagaaacctagtaataccatgaaggttgcgaagtgtttcgctcagcacaaccccagtgtagatcaggtcgatgagtcaccgcattccccacgggtgaccgtggcggtggctgcgctggcggcctgcccatgggattacccatgggacgcttcaatattgacatggtgtgaagagtctattgagctaattggtattcctccggcccctgaatgcggctaatcccaactgcggagcaggtacccacatgccagtgggcagcctgtcgtaatgggcaactctgcagcggaaccgactactttgggtgtccgtgtttctctttattcttatactggctgcttatggtgacaattgagaaattgttgccatatagctattggattggccatccggtgacaaatagagcaattgtgcatccatttgttggttttatactaactcaatctcaaagttttaactaccctcaatctcattatatcattcaatacagcaaa

SEQ ID NO: 23519 - DNA, 544 bp, synthetic construct
  source 1..544: mol_type = other DNA
aggctactcacgtggctgaaggagaaaacgttcgttatccggccaattacttcgagaaacctagtaataccatgaaggttgcgaagtgtttcgctcagcacaaccccagtgtagatcaggtcgatgagtcaccgcattccccacgggtgaccgtggcggtggctgcgctggcggcctgcccatgggattacccatgggacgcttcaatattgacatggtgtgaagagtctattgagctaattggtattcctccggcccctgaatgcggctaatcccaactgcggagcaggtacccacatgccagtgggcagcctgtcgtaatgggcaactctgcagcggaaccgactactttgggtgtccgtgtttctctttattcttatactggctgcttatggtgacaattgagaaattgttgccatatagctattggattggccatccggtgacaaatagagcaattgtgcatccatttgttggttttatactaactcaatctcaaagttttaactaccctcaatctcattatatcattcaatacagcaaa

SEQ ID NO: 23520 - DNA, 694 bp, synthetic construct
  source 1..694: mol_type = other DNA
cactctggtatcacggtacctttgtgcgcctgttttatctaccctccctaaaaatgtaatttagaagcatgatccgaacggtcattaggtagctcagtgcaccaactgagcccagaccaagcacttctgttaccccggactgagtatcaataggctgctcgcgcggctgaaggagaaaacgttcgttatccggccaattacttcgagaaacccagtaccactatgaaagttgcgcagcgtttcgttccgcacaaccccagtgtagatcaggtcgatgagtcaccgcgttccccacgggcgaccgtggcggtggctgcgttggcggcctgctcatggggcaacccatgagacgcttcaatactgacatggtgcgaagagtctattgagctaattggtagccctccggcccctgaatgcggctaatcccaactgcggagcagatacccacaaaccagtgggcagtctgtcgtaatgggtaactctgcagcggaaccgactactttgggtgtccgtgtttccttttgttcttacactggctgcttatggtgacaattgagagattgttgccatatagctattggattggccatccggtgactaacagagcaattgtttacttatttgttggttttataccgttagattacaaagtcctaaacaccctgaatctcattataacacttaattcagcaaa

SEQ ID NO: 23521 - DNA, 644 bp, synthetic construct
  source 1..644: mol_type = other DNA
aaaatgtaatttagaagcatgatccgaacggtcattaggtagctcagtgcaccaactgagcccagaccaagcacttctgttaccccggactgagtatcaataggctgctcgcgcggctgaaggagaaaacgttcgttatccggccaattacttcgagaaacccagtaccactatgaaagttgcgcagcgtttcgttccgcacaaccccagtgtagatcaggtcgatgagtcaccgcgttccccacgggcgaccgtggcggtggctgcgttggcggcctgctcatggggcaacccatgagacgcttcaatactgacatggtgcgaagagtctattgagctaattggtagccctccggcccctgaatgcggctaatcccaactgcggagcagatacccacaaaccagtgggcagtctgtcgtaatgggtaactctgcagcggaaccgactactttgggtgtccgtgtttccttttgttcttacactggctgcttatggtgacaattgagagattgttgccatatagctattggattggccatccggtgactaacagagcaattgtttacttatttgttggttttataccgttagattacaaagtcctaaacaccctgaatctcattataacacttaattcagcaaa

SEQ ID NO: 23522 - DNA, 594 bp, synthetic construct
  source 1..594: mol_type = other DNA
accaactgagcccagaccaagcacttctgttaccccggactgagtatcaataggctgctcgcgcggctgaaggagaaaacgttcgttatccggccaattacttcgagaaacccagtaccactatgaaagttgcgcagcgtttcgttccgcacaaccccagtgtagatcaggtcgatgagtcaccgcgttccccacgggcgaccgtggcggtggctgcgttggcggcctgctcatggggcaacccatgagacgcttcaatactgacatggtgcgaagagtctattgagctaattggtagccctccggcccctgaatgcggctaatcccaactgcggagcagatacccacaaaccagtgggcagtctgtcgtaatgggtaactctgcagcggaaccgactactttgggtgtccgtgtttccttttgttcttacactggctgcttatggtgacaattgagagattgttgccatatagctattggattggccatccggtgactaacagagcaattgtttacttatttgttggttttataccgttagattacaaagtcctaaacaccctgaatctcattataacacttaattcagcaaa

SEQ ID NO: 23523 - DNA, 544 bp, synthetic construct
  source 1..544: mol_type = other DNA
taggctgctcgcgcggctgaaggagaaaacgttcgttatccggccaattacttcgagaaacccagtaccactatgaaagttgcgcagcgtttcgttccgcacaaccccagtgtagatcaggtcgatgagtcaccgcgttccccacgggcgaccgtggcggtggctgcgttggcggcctgctcatggggcaacccatgagacgcttcaatactgacatggtgcgaagagtctattgagctaattggtagccctccggcccctgaatgcggctaatcccaactgcggagcagatacccacaaaccagtgggcagtctgtcgtaatgggtaactctgcagcggaaccgactactttgggtgtccgtgtttccttttgttcttacactggctgcttatggtgacaattgagagattgttgccatatagctattggattggccatccggtgactaacagagcaattgtttacttatttgttggttttataccgttagattacaaagtcctaaacaccctgaatctcattataacacttaattcagcaaa

SEQ ID NO: 23524 - DNA, 694 bp, synthetic construct
  source 1..694: mol_type = other DNA
gcactttggtatcacggtacctttgtgcgcctgttttataacccttcccccccacagaaacttagaagcaccacacaccgatcaatagaaagcgtggcgcaccagccatgtcttgatcaagcacttctgtttccccggaccgagtatcaatagactgctcgcgcggtcgaaggagaaaacgtccgttatccggctgactacttcgagaaacccagtaacaccatggaaattgcggagtgtttcgatcagcacatccccagtgtagatcaggtcgatgagtcaccgcattccccacgggtgaccgtggcggtggctgcgttggcggcctgcctacggggcatcccgtaggacgcttcaaaatggacatggtgcgaagagtctattgagctagtcagtagtcctccggcccctgaatgcggctaatcctaactgcggagcgcgcgcctccaacccagggggtagcgcgtcgtaacgggtaactctgcagcggaaccgactactttgggtgtccgtgtttctttttatcattacattggctgcttatggtgacaattgaaaggttgttaccatatagctattggattggccacccggtgtctaatagagcgattgtgtacctttttgttgggtttgtgccactttgtaaaacagcctatcagactttgtgctttatagtcaaactaaatacagcaaa

SEQ ID NO: 23525 - DNA, 644 bp, synthetic construct
  source 1..644: mol_type = other DNA
cccacagaaacttagaagcaccacacaccgatcaatagaaagcgtggcgcaccagccatgtcttgatcaagcacttctgtttccccggaccgagtatcaatagactgctcgcgcggtcgaaggagaaaacgtccgttatccggctgactacttcgagaaacccagtaacaccatggaaattgcggagtgtttcgatcagcacatccccagtgtagatcaggtcgatgagtcaccgcattccccacgggtgaccgtggcggtggctgcgttggcggcctgcctacggggcatcccgtaggacgcttcaaaatggacatggtgcgaagagtctattgagctagtcagtagtcctccggcccctgaatgcggctaatcctaactgcggagcgcgcgcctccaacccagggggtagcgcgtcgtaacgggtaactctgcagcggaaccgactactttgggtgtccgtgtttctttttatcattacattggctgcttatggtgacaattgaaaggttgttaccatatagctattggattggccacccggtgtctaatagagcgattgtgtacctttttgttgggtttgtgccactttgtaaaacagcctatcagactttgtgctttatagtcaaactaaatacagcaaa

SEQ ID NO: 23526 - DNA, 594 bp, synthetic construct
  source 1..594: mol_type = other DNA
accagccatgtcttgatcaagcacttctgtttccccggaccgagtatcaatagactgctcgcgcggtcgaaggagaaaacgtccgttatccggctgactacttcgagaaacccagtaacaccatggaaattgcggagtgtttcgatcagcacatccccagtgtagatcaggtcgatgagtcaccgcattccccacgggtgaccgtggcggtggctgcgttggcggcctgcctacggggcatcccgtaggacgcttcaaaatggacatggtgcgaagagtctattgagctagtcagtagtcctccggcccctgaatgcggctaatcctaactgcggagcgcgcgcctccaacccagggggtagcgcgtcgtaacgggtaactctgcagcggaaccgactactttgggtgtccgtgtttctttttatcattacattggctgcttatggtgacaattgaaaggttgttaccatatagctattggattggccacccggtgtctaatagagcgattgtgtacctttttgttgggtttgtgccactttgtaaaacagcctatcagactttgtgctttatagtcaaactaaatacagcaaa

SEQ ID NO: 23527 - DNA, 544 bp, synthetic construct
  source 1..544: mol_type = other DNA
tagactgctcgcgcggtcgaaggagaaaacgtccgttatccggctgactacttcgagaaacccagtaacaccatggaaattgcggagtgtttcgatcagcacatccccagtgtagatcaggtcgatgagtcaccgcattccccacgggtgaccgtggcggtggctgcgttggcggcctgcctacggggcatcccgtaggacgcttcaaaatggacatggtgcgaagagtctattgagctagtcagtagtcctccggcccctgaatgcggctaatcctaactgcggagcgcgcgcctccaacccagggggtagcgcgtcgtaacgggtaactctgcagcggaaccgactactttgggtgtccgtgtttctttttatcattacattggctgcttatggtgacaattgaaaggttgttaccatatagctattggattggccacccggtgtctaatagagcgattgtgtacctttttgttgggtttgtgccactttgtaaaacagcctatcagactttgtgctttatagtcaaactaaatacagcaaa

SEQ ID NO: 23528 - DNA, 694 bp, synthetic construct
  source 1..694: mol_type = other DNA
cacactggtattacggtacctttgtgcgcctgttttatataccccccccaagtgcaacttagaagcaagacatgaccggtcagcaggtgattcagtaaaccaactgagtcttgaccaagcacttctgtttccccggaccgagtatcaataggctgcttacgcggctgaaggagaaagtgttcgttacccggccaattacttcgagaagcctagtaccaccatggaggttgcgcggcgtttcgctccgcacacccccagtgtagatcaggccgatgagccaccgcattccccacgggtgaccgtggcggtggctgcgttggcggcctgcccatggggtaacctatgggacgcttcaatactgacatggtgcgaagagcctattgagctaattggtagtcctccggcccctgaatgcggctaatcctaactgcggagcaggtacccacataccagtgggcagcctgtcgtaacgggtaactctgcagcggaaccgactactttgggtgaccgtgtttccttttattttttcctattggctgcttatggtgacaatcgaggaattgttgccatatagctattggattggccatccggtgtcaaatagagcgattatttacctgtttgttggatttgtaccactgaactttaaggcgctcatcactctcaactatattttatcccttaacgcaacaaa

SEQ ID NO: 23529 - DNA, 644 bp, synthetic construct
  source 1..644: mol_type = other DNA
agtgcaacttagaagcaagacatgaccggtcagcaggtgattcagtaaaccaactgagtcttgaccaagcacttctgtttccccggaccgagtatcaataggctgcttacgcggctgaaggagaaagtgttcgttacccggccaattacttcgagaagcctagtaccaccatggaggttgcgcggcgtttcgctccgcacacccccagtgtagatcaggccgatgagccaccgcattccccacgggtgaccgtggcggtggctgcgttggcggcctgcccatggggtaacctatgggacgcttcaatactgacatggtgcgaagagcctattgagctaattggtagtcctccggcccctgaatgcggctaatcctaactgcggagcaggtacccacataccagtgggcagcctgtcgtaacgggtaactctgcagcggaaccgactactttgggtgaccgtgtttccttttattttttcctattggctgcttatggtgacaatcgaggaattgttgccatatagctattggattggccatccggtgtcaaatagagcgattatttacctgtttgttggatttgtaccactgaactttaaggcgctcatcactctcaactatattttatcccttaacgcaacaaa

SEQ ID NO: 23530 - DNA, 594 bp, synthetic construct
  source 1..594: mol_type = other DNA
caactgagtcttgaccaagcacttctgtttccccggaccgagtatcaataggctgcttacgcggctgaaggagaaagtgttcgttacccggccaattacttcgagaagcctagtaccaccatggaggttgcgcggcgtttcgctccgcacacccccagtgtagatcaggccgatgagccaccgcattccccacgggtgaccgtggcggtggctgcgttggcggcctgcccatggggtaacctatgggacgcttcaatactgacatggtgcgaagagcctattgagctaattggtagtcctccggcccctgaatgcggctaatcctaactgcggagcaggtacccacataccagtgggcagcctgtcgtaacgggtaactctgcagcggaaccgactactttgggtgaccgtgtttccttttattttttcctattggctgcttatggtgacaatcgaggaattgttgccatatagctattggattggccatccggtgtcaaatagagcgattatttacctgtttgttggatttgtaccactgaactttaaggcgctcatcactctcaactatattttatcccttaacgcaacaaa

SEQ ID NO: 23531 - DNA, 544 bp, synthetic construct
  source 1..544: mol_type = other DNA
ggctgcttacgcggctgaaggagaaagtgttcgttacccggccaattacttcgagaagcctagtaccaccatggaggttgcgcggcgtttcgctccgcacacccccagtgtagatcaggccgatgagccaccgcattccccacgggtgaccgtggcggtggctgcgttggcggcctgcccatggggtaacctatgggacgcttcaatactgacatggtgcgaagagcctattgagctaattggtagtcctccggcccctgaatgcggctaatcctaactgcggagcaggtacccacataccagtgggcagcctgtcgtaacgggtaactctgcagcggaaccgactactttgggtgaccgtgtttccttttattttttcctattggctgcttatggtgacaatcgaggaattgttgccatatagctattggattggccatccggtgtcaaatagagcgattatttacctgtttgttggatttgtaccactgaactttaaggcgctcatcactctcaactatattttatcccttaacgcaacaaa

SEQ ID NO: 23532 - DNA, 694 bp, synthetic construct
  source 1..694: mol_type = other DNA
cacactggtatcacggtacccttgtgcgcctgttttatccaccccttcccacagtaacttagaagcacaccatgtatacggtcaataggcggctcagtacaccaactgggccacgaccaagcacttctgttaccccggactgagtatcaataagctgctcacgcggctgaaggagaaaacgttcgttacccggccaattacttcgagaaacccagtaccaccatgaaggttgcgcagcgtttcgttccgcacaaccccagtgtagatcaggtcgatgagtcaccgcgttcctcacgggtgaccgtggcggtggctgcgttggcggcctgcccatggggcaacccatgggacgcttcaatactgacatggtgcgaagagtctattgagctaattggtagtcctccggcccctgaatgcggctaatcctaactgcggagcagatacccacaaaccagtgggcagtctgtcgtaacgggcaactctgcagcggaaccgactactttgggtgtccgtgtttccttttatccttacactggctgcttatggtgacaattgagaaattgttaccatatagctattggattggccatccggtgacaaacagagcagttgtttacctatttgttggtttcgtaccgctgaaccttaaagttctaaagaccctcaattttatcttagcacttaacacagcaaa

SEQ ID NO: 23533 - DNA, 644 bp, synthetic construct
  source 1..644: mol_type = other DNA
acagtaacttagaagcacaccatgtatacggtcaataggcggctcagtacaccaactgggccacgaccaagcacttctgttaccccggactgagtatcaataagctgctcacgcggctgaaggagaaaacgttcgttacccggccaattacttcgagaaacccagtaccaccatgaaggttgcgcagcgtttcgttccgcacaaccccagtgtagatcaggtcgatgagtcaccgcgttcctcacgggtgaccgtggcggtggctgcgttggcggcctgcccatggggcaacccatgggacgcttcaatactgacatggtgcgaagagtctattgagctaattggtagtcctccggcccctgaatgcggctaatcctaactgcggagcagatacccacaaaccagtgggcagtctgtcgtaacgggcaactctgcagcggaaccgactactttgggtgtccgtgtttccttttatccttacactggctgcttatggtgacaattgagaaattgttaccatatagctattggattggccatccggtgacaaacagagcagttgtttacctatttgttggtttcgtaccgctgaaccttaaagttctaaagaccctcaattttatcttagcacttaacacagcaaa

SEQ ID NO: 23534 - DNA, 594 bp, synthetic construct
  source 1..594: mol_type = other DNA
accaactgggccacgaccaagcacttctgttaccccggactgagtatcaataagctgctcacgcggctgaaggagaaaacgttcgttacccggccaattacttcgagaaacccagtaccaccatgaaggttgcgcagcgtttcgttccgcacaaccccagtgtagatcaggtcgatgagtcaccgcgttcctcacgggtgaccgtggcggtggctgcgttggcggcctgcccatggggcaacccatgggacgcttcaatactgacatggtgcgaagagtctattgagctaattggtagtcctccggcccctgaatgcggctaatcctaactgcggagcagatacccacaaaccagtgggcagtctgtcgtaacgggcaactctgcagcggaaccgactactttgggtgtccgtgtttccttttatccttacactggctgcttatggtgacaattgagaaattgttaccatatagctattggattggccatccggtgacaaacagagcagttgtttacctatttgttggtttcgtaccgctgaaccttaaagttctaaagaccctcaattttatcttagcacttaacacagcaaa

SEQ ID NO: 23535 - DNA, 544 bp, synthetic construct
  source 1..544: mol_type = other DNA
taagctgctcacgcggctgaaggagaaaacgttcgttacccggccaattacttcgagaaacccagtaccaccatgaaggttgcgcagcgtttcgttccgcacaaccccagtgtagatcaggtcgatgagtcaccgcgttcctcacgggtgaccgtggcggtggctgcgttggcggcctgcccatggggcaacccatgggacgcttcaatactgacatggtgcgaagagtctattgagctaattggtagtcctccggcccctgaatgcggctaatcctaactgcggagcagatacccacaaaccagtgggcagtctgtcgtaacgggcaactctgcagcggaaccgactactttgggtgtccgtgtttccttttatccttacactggctgcttatggtgacaattgagaaattgttaccatatagctattggattggccatccggtgacaaacagagcagttgtttacctatttgttggtttcgtaccgctgaaccttaaagttctaaagaccctcaattttatcttagcacttaacacagcaaa

SEQ ID NO: 23536 - DNA, 694 bp, synthetic construct
  source 1..694: mol_type = other DNA
gtacaccggtattacggtacccttgtacgcctgttttatactcccttccccgcaacttagaagttaaacaaaccaagttcaatagaagggggtgcaaaccagtaccaccacgaacaagcacttctgtttccccggtgacgtcatataggttgtaaccacggccaaaagtgactgatccgttatccgctcttgtacttcgagaagcccagtaccatcttgggatcttcgatgcgttgcgctcagcactcgaacccggagtgtagcttaggccgatgagtctggacattccccaccggtgacggtggtccaggctgcgttggcggcctacctgtggtccaagccacaggacgctagatgtgaacaaggtgtgaagagcctattgagctacaagggaatcctccggcccctgaatgcggctaatcctaactacggagcagacggtcacaaaccagtgaatggtctgtcgtaatgcgcaagtctgtagcggaaccgactactttgggtgtccgtgtttccttttatctttttaatggctgcttatggtgacaatcctagattgttatcataaagcgatttggattggccatccagtgatatttgaaaccattactgtattgcctgctaaggctattttaaagacttaataaacacaacttcattcaactcaattacaccaactaacaactgtctcata

SEQ ID NO: 23537 - DNA, 644 bp, synthetic construct
  source 1..644: mol_type = other DNA
cgcaacttagaagttaaacaaaccaagttcaatagaagggggtgcaaaccagtaccaccacgaacaagcacttctgtttccccggtgacgtcatataggttgtaaccacggccaaaagtgactgatccgttatccgctcttgtacttcgagaagcccagtaccatcttgggatcttcgatgcgttgcgctcagcactcgaacccggagtgtagcttaggccgatgagtctggacattccccaccggtgacggtggtccaggctgcgttggcggcctacctgtggtccaagccacaggacgctagatgtgaacaaggtgtgaagagcctattgagctacaagggaatcctccggcccctgaatgcggctaatcctaactacggagcagacggtcacaaaccagtgaatggtctgtcgtaatgcgcaagtctgtagcggaaccgactactttgggtgtccgtgtttccttttatctttttaatggctgcttatggtgacaatcctagattgttatcataaagcgatttggattggccatccagtgatatttgaaaccattactgtattgcctgctaaggctattttaaagacttaataaacacaacttcattcaactcaattacaccaactaacaactgtctcata

SEQ ID NO: 23538 - DNA, 594 bp, synthetic construct
  source 1..594: mol_type = other DNA
agtaccaccacgaacaagcacttctgtttccccggtgacgtcatataggttgtaaccacggccaaaagtgactgatccgttatccgctcttgtacttcgagaagcccagtaccatcttgggatcttcgatgcgttgcgctcagcactcgaacccggagtgtagcttaggccgatgagtctggacattccccaccggtgacggtggtccaggctgcgttggcggcctacctgtggtccaagccacaggacgctagatgtgaacaaggtgtgaagagcctattgagctacaagggaatcctccggcccctgaatgcggctaatcctaactacggagcagacggtcacaaaccagtgaatggtctgtcgtaatgcgcaagtctgtagcggaaccgactactttgggtgtccgtgtttccttttatctttttaatggctgcttatggtgacaatcctagattgttatcataaagcgatttggattggccatccagtgatatttgaaaccattactgtattgcctgctaaggctattttaaagacttaataaacacaacttcattcaactcaattacaccaactaacaactgtctcata

SEQ ID NO: 23539 - DNA, 544 bp, synthetic construct
  source 1..544: mol_type = other DNA
tgtaaccacggccaaaagtgactgatccgttatccgctcttgtacttcgagaagcccagtaccatcttgggatcttcgatgcgttgcgctcagcactcgaacccggagtgtagcttaggccgatgagtctggacattccccaccggtgacggtggtccaggctgcgttggcggcctacctgtggtccaagccacaggacgctagatgtgaacaaggtgtgaagagcctattgagctacaagggaatcctccggcccctgaatgcggctaatcctaactacggagcagacggtcacaaaccagtgaatggtctgtcgtaatgcgcaagtctgtagcggaaccgactactttgggtgtccgtgtttccttttatctttttaatggctgcttatggtgacaatcctagattgttatcataaagcgatttggattggccatccagtgatatttgaaaccattactgtattgcctgctaaggctattttaaagacttaataaacacaacttcattcaactcaattacaccaactaacaactgtctcata

SEQ ID NO: 23540 - DNA, 694 bp, synthetic construct
  source 1..694: mol_type = other DNA
gcactctggtattacggtacctttgtgcgcctgttttacatccctcccccagatgcaacttagaagcagtacaccaagaccaatagtaggcatggcataccagccatgtgtcggtcaagcacttctgttcccccgggctgagtatcaataaactgctcacgtggttgaaggagaaagcgcccgttacccggctaactacttcgagaagcctattaacaccatgaaagttgcggagtgtttcgctcagcacgatcccggtgtagatcaggccgatgagtcaccgcgttccccacaggtgactgtggcggtggctgcgttggcggcctgcccatggggcaacccatgggacgcttcaatatggacatggtgtgaagagcccattgagctagttagtagtcctccggcccctgaatgcggctaatcccaactgcggagcacagcgcccccgctccagggggtagtgtgtcgtaacgggcaactctgcagcggaaccgactactttgggtgtccgtgtttccttttttccttttcattggctgcttatggtgacaattgaaagattgttaccatatagctattggattggccatccagtgtcaagcagagctataatttaccaatttatagggtttgtcccgttggatctgaaagctttaaaaacccttaacttggtactactattaaacagtgtaaa

SEQ ID NO: 23541 - DNA, 644 bp, synthetic construct
  source 1..644: mol_type = other DNA
agatgcaacttagaagcagtacaccaagaccaatagtaggcatggcataccagccatgtgtcggtcaagcacttctgttcccccgggctgagtatcaataaactgctcacgtggttgaaggagaaagcgcccgttacccggctaactacttcgagaagcctattaacaccatgaaagttgcggagtgtttcgctcagcacgatcccggtgtagatcaggccgatgagtcaccgcgttccccacaggtgactgtggcggtggctgcgttggcggcctgcccatggggcaacccatgggacgcttcaatatggacatggtgtgaagagcccattgagctagttagtagtcctccggcccctgaatgcggctaatcccaactgcggagcacagcgcccccgctccagggggtagtgtgtcgtaacgggcaactctgcagcggaaccgactactttgggtgtccgtgtttccttttttccttttcattggctgcttatggtgacaattgaaagattgttaccatatagctattggattggccatccagtgtcaagcagagctataatttaccaatttatagggtttgtcccgttggatctgaaagctttaaaaacccttaacttggtactactattaaacagtgtaaa

SEQ ID NO: 23542 - DNA, 594 bp, synthetic construct
  source 1..594: mol_type = other DNA
cagccatgtgtcggtcaagcacttctgttcccccgggctgagtatcaataaactgctcacgtggttgaaggagaaagcgcccgttacccggctaactacttcgagaagcctattaacaccatgaaagttgcggagtgtttcgctcagcacgatcccggtgtagatcaggccgatgagtcaccgcgttccccacaggtgactgtggcggtggctgcgttggcggcctgcccatggggcaacccatgggacgcttcaatatggacatggtgtgaagagcccattgagctagttagtagtcctccggcccctgaatgcggctaatcccaactgcggagcacagcgcccccgctccagggggtagtgtgtcgtaacgggcaactctgcagcggaaccgactactttgggtgtccgtgtttccttttttccttttcattggctgcttatggtgacaattgaaagattgttaccatatagctattggattggccatccagtgtcaagcagagctataatttaccaatttatagggtttgtcccgttggatctgaaagctttaaaaacccttaacttggtactactattaaacagtgtaaa

SEQ ID NO: 23543 - DNA, 544 bp, synthetic construct
  source 1..544: mol_type = other DNA
aactgctcacgtggttgaaggagaaagcgcccgttacccggctaactacttcgagaagcctattaacaccatgaaagttgcggagtgtttcgctcagcacgatcccggtgtagatcaggccgatgagtcaccgcgttccccacaggtgactgtggcggtggctgcgttggcggcctgcccatggggcaacccatgggacgcttcaatatggacatggtgtgaagagcccattgagctagttagtagtcctccggcccctgaatgcggctaatcccaactgcggagcacagcgcccccgctccagggggtagtgtgtcgtaacgggcaactctgcagcggaaccgactactttgggtgtccgtgtttccttttttccttttcattggctgcttatggtgacaattgaaagattgttaccatatagctattggattggccatccagtgtcaagcagagctataatttaccaatttatagggtttgtcccgttggatctgaaagctttaaaaacccttaacttggtactactattaaacagtgtaaa

SEQ ID NO: 23544 - DNA, 694 bp, synthetic construct
  source 1..694: mol_type = other DNA
gcactctggtatcacggtacctttgtgcgcctgttttatagcccctcccttagataggaatttagaagcactgcacaccgatcaatagcaggcgcggcacgccagccacgtcttgatcaagcacttctgtttccccggaccgagtatcaatagactgttaacgcggtcgaaggagaaaacgttcgttatccggccaactacttcgagaaacctagtaacgccatggaagttgcggagtgtttcgctcagcacatccccagtgtagatcaggtcgatgagtcaccgcatccctcacgggtgaccgtggcggtggctgcgttggcggcctgcctacggggcaacccgtaggacgcttcaatatggacatggtgcgaagagtatattgagctagttggtagtcctccggcccctgaatgcggctaatcctaactgcggagcgctcgcccccaatccagggggtcgtgcgtcgtaacgggtaactctgcagcggaaccgactactttgggtgtccgtgtttccttttatctttatcacggctgcttatggtgacaattgaaagattgttaccatatagctattggattggccatcctgtgtctaacagagcaatcatatatctttttgttggatttgtgccacttgataaaataagttaccagactttgtgttttatcatcagactaaacacaacaaa

SEQ ID NO: 23545 - DNA, 644 bp, synthetic construct
  source 1..644: mol_type = other DNA
tagataggaatttagaagcactgcacaccgatcaatagcaggcgcggcacgccagccacgtcttgatcaagcacttctgtttccccggaccgagtatcaatagactgttaacgcggtcgaaggagaaaacgttcgttatccggccaactacttcgagaaacctagtaacgccatggaagttgcggagtgtttcgctcagcacatccccagtgtagatcaggtcgatgagtcaccgcatccctcacgggtgaccgtggcggtggctgcgttggcggcctgcctacggggcaacccgtaggacgcttcaatatggacatggtgcgaagagtatattgagctagttggtagtcctccggcccctgaatgcggctaatcctaactgcggagcgctcgcccccaatccagggggtcgtgcgtcgtaacgggtaactctgcagcggaaccgactactttgggtgtccgtgtttccttttatctttatcacggctgcttatggtgacaattgaaagattgttaccatatagctattggattggccatcctgtgtctaacagagcaatcatatatctttttgttggatttgtgccacttgataaaataagttaccagactttgtgttttatcatcagactaaacacaacaaa

SEQ ID NO: 23546 - DNA, 594 bp, synthetic construct
  source 1..594: mol_type = other DNA
gccagccacgtcttgatcaagcacttctgtttccccggaccgagtatcaatagactgttaacgcggtcgaaggagaaaacgttcgttatccggccaactacttcgagaaacctagtaacgccatggaagttgcggagtgtttcgctcagcacatccccagtgtagatcaggtcgatgagtcaccgcatccctcacgggtgaccgtggcggtggctgcgttggcggcctgcctacggggcaacccgtaggacgcttcaatatggacatggtgcgaagagtatattgagctagttggtagtcctccggcccctgaatgcggctaatcctaactgcggagcgctcgcccccaatccagggggtcgtgcgtcgtaacgggtaactctgcagcggaaccgactactttgggtgtccgtgtttccttttatctttatcacggctgcttatggtgacaattgaaagattgttaccatatagctattggattggccatcctgtgtctaacagagcaatcatatatctttttgttggatttgtgccacttgataaaataagttaccagactttgtgttttatcatcagactaaacacaacaaa

SEQ ID NO: 23547 - DNA, 544 bp, synthetic construct
  source 1..544: mol_type = other DNA
tagactgttaacgcggtcgaaggagaaaacgttcgttatccggccaactacttcgagaaacctagtaacgccatggaagttgcggagtgtttcgctcagcacatccccagtgtagatcaggtcgatgagtcaccgcatccctcacgggtgaccgtggcggtggctgcgttggcggcctgcctacggggcaacccgtaggacgcttcaatatggacatggtgcgaagagtatattgagctagttggtagtcctccggcccctgaatgcggctaatcctaactgcggagcgctcgcccccaatccagggggtcgtgcgtcgtaacgggtaactctgcagcggaaccgactactttgggtgtccgtgtttccttttatctttatcacggctgcttatggtgacaattgaaagattgttaccatatagctattggattggccatcctgtgtctaacagagcaatcatatatctttttgttggatttgtgccacttgataaaataagttaccagactttgtgttttatcatcagactaaacacaacaaa

SEQ ID NO: 23548 - DNA, 694 bp, synthetic construct
  source 1..694: mol_type = other DNA
cacactggtatcacggtacccttgtgcgcctgttttatcaacccctccccacattgaaacttagaagtaacacacaccgatcaatagtgggcgtggcaaaccagctacgtcgtgatcaagtatttctgtttccccggactgagtatcaatagactgctcgcgcggttgaaggagaaaacgttcgttacccggctaactacttcgagaaacctagtaatgccatgaaaattgcgtagcgtttcgttcagcacaaccccagtgtagatcaggtcgatgagtcactgcattcctcacgggcgaccgtggcagtggctgcgttggcggcctgcctatagggtaacctataggacgctacaatatggacatggtgtgaagagtctattgagctagttagtagtcctccggcccctgaatgcggctaatcctaactgcggagcgcgtgtttccaatccaggaagtggcgcgtcgtaatgggcaactctgcagcggaaccgactactttgggtgtccgtgtttctcttttatccttacactggctgcttatggtgacaattgaagaattgttaccatatagctattggattggccatccggtgtctaatagagcaattgtatacctctttgttggatttataccattaaacagaacaagttaccagaccctgtgctttattgttaaactaaacacgacgaa

SEQ ID NO: 23549 - DNA, 644 bp, synthetic construct
  source 1..644: mol_type = other DNA
acattgaaacttagaagtaacacacaccgatcaatagtgggcgtggcaaaccagctacgtcgtgatcaagtatttctgtttccccggactgagtatcaatagactgctcgcgcggttgaaggagaaaacgttcgttacccggctaactacttcgagaaacctagtaatgccatgaaaattgcgtagcgtttcgttcagcacaaccccagtgtagatcaggtcgatgagtcactgcattcctcacgggcgaccgtggcagtggctgcgttggcggcctgcctatagggtaacctataggacgctacaatatggacatggtgtgaagagtctattgagctagttagtagtcctccggcccctgaatgcggctaatcctaactgcggagcgcgtgtttccaatccaggaagtggcgcgtcgtaatgggcaactctgcagcggaaccgactactttgggtgtccgtgtttctcttttatccttacactggctgcttatggtgacaattgaagaattgttaccatatagctattggattggccatccggtgtctaatagagcaattgtatacctctttgttggatttataccattaaacagaacaagttaccagaccctgtgctttattgttaaactaaacacgacgaa

SEQ ID NO: 23550 - DNA, 594 bp, synthetic construct
  source 1..594: mol_type = other DNA
ccagctacgtcgtgatcaagtatttctgtttccccggactgagtatcaatagactgctcgcgcggttgaaggagaaaacgttcgttacccggctaactacttcgagaaacctagtaatgccatgaaaattgcgtagcgtttcgttcagcacaaccccagtgtagatcaggtcgatgagtcactgcattcctcacgggcgaccgtggcagtggctgcgttggcggcctgcctatagggtaacctataggacgctacaatatggacatggtgtgaagagtctattgagctagttagtagtcctccggcccctgaatgcggctaatcctaactgcggagcgcgtgtttccaatccaggaagtggcgcgtcgtaatgggcaactctgcagcggaaccgactactttgggtgtccgtgtttctcttttatccttacactggctgcttatggtgacaattgaagaattgttaccatatagctattggattggccatccggtgtctaatagagcaattgtatacctctttgttggatttataccattaaacagaacaagttaccagaccctgtgctttattgttaaactaaacacgacgaa

SEQ ID NO: 23551 - DNA, 544 bp, synthetic construct
  source 1..544: mol_type = other DNA
agactgctcgcgcggttgaaggagaaaacgttcgttacccggctaactacttcgagaaacctagtaatgccatgaaaattgcgtagcgtttcgttcagcacaaccccagtgtagatcaggtcgatgagtcactgcattcctcacgggcgaccgtggcagtggctgcgttggcggcctgcctatagggtaacctataggacgctacaatatggacatggtgtgaagagtctattgagctagttagtagtcctccggcccctgaatgcggctaatcctaactgcggagcgcgtgtttccaatccaggaagtggcgcgtcgtaatgggcaactctgcagcggaaccgactactttgggtgtccgtgtttctcttttatccttacactggctgcttatggtgacaattgaagaattgttaccatatagctattggattggccatccggtgtctaatagagcaattgtatacctctttgttggatttataccattaaacagaacaagttaccagaccctgtgctttattgttaaactaaacacgacgaa

SEQ ID NO: 23552 - DNA, 694 bp, synthetic construct
  source 1..694: mol_type = other DNA
gcactctggtattacggtacccttgtgcgcctgttttatatcccttccccaaggtaaacgttagaagcaatgcactcccgatcaatagaaggtgcgacgcgccagtcgtatctcgatcaagcacttctgtttccccggaccgagtatcaatagactgctagcgcggttgaaggagaaaacgttcgttacccgactaactacttcgagaagcccagtagcgccatgaaagttgcagagtgtttcgctcagcacttcccccgtgtagatcaggccgatgagtcaccgcaatccccacgggcgaccgtggcggtggctgcgttggcggcctgcctatggggaaacccataggacgctcaaatacagacatggtgcgaagagtctattgagctagttagtactcctccggcccctgaatgcggctaatcctaactgcggagcaagtactcacaatccagtgggcagcttgtcgtaacgggtaactctgcagcggaaccgactactttgggtgtccgtgtttccttttattcctacattggctgcttatggtgacaatcaaagagttgttaccatatagctattggattggccatccggtgactaataaagcaattatatttctttttgttgggtttgtaccccttaatacaaccagcttcaccacattgtgttacatcattagactgaacaaggcaaa

SEQ ID NO: 23553 - DNA, 644 bp, synthetic construct
  source 1..644: mol_type = other DNA
aaggtaaacgttagaagcaatgcactcccgatcaatagaaggtgcgacgcgccagtcgtatctcgatcaagcacttctgtttccccggaccgagtatcaatagactgctagcgcggttgaaggagaaaacgttcgttacccgactaactacttcgagaagcccagtagcgccatgaaagttgcagagtgtttcgctcagcacttcccccgtgtagatcaggccgatgagtcaccgcaatccccacgggcgaccgtggcggtggctgcgttggcggcctgcctatggggaaacccataggacgctcaaatacagacatggtgcgaagagtctattgagctagttagtactcctccggcccctgaatgcggctaatcctaactgcggagcaagtactcacaatccagtgggcagcttgtcgtaacgggtaactctgcagcggaaccgactactttgggtgtccgtgtttccttttattcctacattggctgcttatggtgacaatcaaagagttgttaccatatagctattggattggccatccggtgactaataaagcaattatatttctttttgttgggtttgtaccccttaatacaaccagcttcaccacattgtgttacatcattagactgaacaaggcaaa

SEQ ID NO: 23554 - DNA, 594 bp, synthetic construct
  source 1..594: mol_type = other DNA
gccagtcgtatctcgatcaagcacttctgtttccccggaccgagtatcaatagactgctagcgcggttgaaggagaaaacgttcgttacccgactaactacttcgagaagcccagtagcgccatgaaagttgcagagtgtttcgctcagcacttcccccgtgtagatcaggccgatgagtcaccgcaatccccacgggcgaccgtggcggtggctgcgttggcggcctgcctatggggaaacccataggacgctcaaatacagacatggtgcgaagagtctattgagctagttagtactcctccggcccctgaatgcggctaatcctaactgcggagcaagtactcacaatccagtgggcagcttgtcgtaacgggtaactctgcagcggaaccgactactttgggtgtccgtgtttccttttattcctacattggctgcttatggtgacaatcaaagagttgttaccatatagctattggattggccatccggtgactaataaagcaattatatttctttttgttgggtttgtaccccttaatacaaccagcttcaccacattgtgttacatcattagactgaacaaggcaaa

SEQ ID NO: 23555 - DNA, 544 bp, synthetic construct
  source 1..544: mol_type = other DNA
tagactgctagcgcggttgaaggagaaaacgttcgttacccgactaactacttcgagaagcccagtagcgccatgaaagttgcagagtgtttcgctcagcacttcccccgtgtagatcaggccgatgagtcaccgcaatccccacgggcgaccgtggcggtggctgcgttggcggcctgcctatggggaaacccataggacgctcaaatacagacatggtgcgaagagtctattgagctagttagtactcctccggcccctgaatgcggctaatcctaactgcggagcaagtactcacaatccagtgggcagcttgtcgtaacgggtaactctgcagcggaaccgactactttgggtgtccgtgtttccttttattcctacattggctgcttatggtgacaatcaaagagttgttaccatatagctattggattggccatccggtgactaataaagcaattatatttctttttgttgggtttgtaccccttaatacaaccagcttcaccacattgtgttacatcattagactgaacaaggcaaa

SEQ ID NO: 23556 - DNA, 694 bp, synthetic construct
  source 1..694: mol_type = other DNA
cacactggtatcacggtacttttgtgcgcctgttttatctacccccacccccagcgtaacttagaagcacatttcacacggtcaataggtgactcagcatgccagctgagttttggccaagcacttctgttaccccggaccgagtatcaataagctactcacgtggctgaaggagaaagcgttcgttaaccggccaattacttcgagaaacctagtatcaccatgaaggttgcgtggcgtttcgctccgcacaaccccagtgtagatcaggtcgatgagttaccgcgtccctcacgggcgaccgtggcggtagctgcgctggcggcctgcccatggggcaacccatgggacgcttcaatactgacatggtgtgaagagtctattgagctaattggtagtcctccggcccctgaatgcggctaatcctaactgcggagcagatacccacacgccagtgggcagtctgtcgtaatgggcaactctgcagcggaaccgactactttgggtgtccgtgtttccttttactcttatattggctgcttatggtgacaattaaaagattgttaccatatagctattggattggccatccagtgtctaatagagcgatcatttacctttttcttgggtttgttccactcaactataaagcacttgtaacgctcaaatatattataaacctcaacacaacaaa

SEQ ID NO: 23557 - DNA, 644 bp, synthetic construct
  source 1..644: mol_type = other DNA
ccagcgtaacttagaagcacatttcacacggtcaataggtgactcagcatgccagctgagttttggccaagcacttctgttaccccggaccgagtatcaataagctactcacgtggctgaaggagaaagcgttcgttaaccggccaattacttcgagaaacctagtatcaccatgaaggttgcgtggcgtttcgctccgcacaaccccagtgtagatcaggtcgatgagttaccgcgtccctcacgggcgaccgtggcggtagctgcgctggcggcctgcccatggggcaacccatgggacgcttcaatactgacatggtgtgaagagtctattgagctaattggtagtcctccggcccctgaatgcggctaatcctaactgcggagcagatacccacacgccagtgggcagtctgtcgtaatgggcaactctgcagcggaaccgactactttgggtgtccgtgtttccttttactcttatattggctgcttatggtgacaattaaaagattgttaccatatagctattggattggccatccagtgtctaatagagcgatcatttacctttttcttgggtttgttccactcaactataaagcacttgtaacgctcaaatatattataaacctcaacacaacaaa

SEQ ID NO: 23558 - DNA, 594 bp, synthetic construct
  source 1..594: mol_type = other DNA
gccagctgagttttggccaagcacttctgttaccccggaccgagtatcaataagctactcacgtggctgaaggagaaagcgttcgttaaccggccaattacttcgagaaacctagtatcaccatgaaggttgcgtggcgtttcgctccgcacaaccccagtgtagatcaggtcgatgagttaccgcgtccctcacgggcgaccgtggcggtagctgcgctggcggcctgcccatggggcaacccatgggacgcttcaatactgacatggtgtgaagagtctattgagctaattggtagtcctccggcccctgaatgcggctaatcctaactgcggagcagatacccacacgccagtgggcagtctgtcgtaatgggcaactctgcagcggaaccgactactttgggtgtccgtgtttccttttactcttatattggctgcttatggtgacaattaaaagattgttaccatatagctattggattggccatccagtgtctaatagagcgatcatttacctttttcttgggtttgttccactcaactataaagcacttgtaacgctcaaatatattataaacctcaacacaacaaa

SEQ ID NO: 23559 - DNA, 544 bp, synthetic construct
  source 1..544: mol_type = other DNA
taagctactcacgtggctgaaggagaaagcgttcgttaaccggccaattacttcgagaaacctagtatcaccatgaaggttgcgtggcgtttcgctccgcacaaccccagtgtagatcaggtcgatgagttaccgcgtccctcacgggcgaccgtggcggtagctgcgctggcggcctgcccatggggcaacccatgggacgcttcaatactgacatggtgtgaagagtctattgagctaattggtagtcctccggcccctgaatgcggctaatcctaactgcggagcagatacccacacgccagtgggcagtctgtcgtaatgggcaactctgcagcggaaccgactactttgggtgtccgtgtttccttttactcttatattggctgcttatggtgacaattaaaagattgttaccatatagctattggattggccatccagtgtctaatagagcgatcatttacctttttcttgggtttgttccactcaactataaagcacttgtaacgctcaaatatattataaacctcaacacaacaaa

SEQ ID NO: 23560 - DNA, 695 bp, synthetic construct
  source 1..695: mol_type = other DNA
cactctggtatcacggtacctttgtgcgcctgttttatatccctttccccatgtaacttagaagttattaaacaaagttcaatagaagggggtacaaaccagtgccaccacgaacaagcacttctgtttccccggtgaagctgtatagactgtctccacggttgaaaatggcagatccgttacccgctttggtacttcgagaaacctagtatcaccttggaatcttcgatgcgttgcgctcagcactcaaccccagagtgtagcttaggtcgatgagtctggacgatcctcactggtgacagtggtccaggctgcgttggcggcctacctgtggtgaaaaccacaggacgctagttgtgaacaaggtgtgaagagtctattgagctaccaaagagtcctccggcccctgaatgcggctaatcctaaccacggagcaagtgccttcaaaccagtaggtagcttgtcgtaacgcgcaagtctgtggcggaaccgactactttgggtgtccgtgtttccttttattttatcatggctgcttatggtgacaatctaagattgttatcatatagctattggattggccatccggtgactaacagagatctcatatacctttttgttggttttactaaattaaatattaccacgttcaagacacttctccttatcatacaactaaatagtgagaagagaaa

SEQ ID NO: 23561 - DNA, 645 bp, synthetic construct
  source 1..645: mol_type = other DNA
atgtaacttagaagttattaaacaaagttcaatagaagggggtacaaaccagtgccaccacgaacaagcacttctgtttccccggtgaagctgtatagactgtctccacggttgaaaatggcagatccgttacccgctttggtacttcgagaaacctagtatcaccttggaatcttcgatgcgttgcgctcagcactcaaccccagagtgtagcttaggtcgatgagtctggacgatcctcactggtgacagtggtccaggctgcgttggcggcctacctgtggtgaaaaccacaggacgctagttgtgaacaaggtgtgaagagtctattgagctaccaaagagtcctccggcccctgaatgcggctaatcctaaccacggagcaagtgccttcaaaccagtaggtagcttgtcgtaacgcgcaagtctgtggcggaaccgactactttgggtgtccgtgtttccttttattttatcatggctgcttatggtgacaatctaagattgttatcatatagctattggattggccatccggtgactaacagagatctcatatacctttttgttggttttactaaattaaatattaccacgttcaagacacttctccttatcatacaactaaatagtgagaagagaaa

SEQ ID NO: 23562 - DNA, 595 bp, synthetic construct
  source 1..595: mol_type = other DNA
agtgccaccacgaacaagcacttctgtttccccggtgaagctgtatagactgtctccacggttgaaaatggcagatccgttacccgctttggtacttcgagaaacctagtatcaccttggaatcttcgatgcgttgcgctcagcactcaaccccagagtgtagcttaggtcgatgagtctggacgatcctcactggtgacagtggtccaggctgcgttggcggcctacctgtggtgaaaaccacaggacgctagttgtgaacaaggtgtgaagagtctattgagctaccaaagagtcctccggcccctgaatgcggctaatcctaaccacggagcaagtgccttcaaaccagtaggtagcttgtcgtaacgcgcaagtctgtggcggaaccgactactttgggtgtccgtgtttccttttattttatcatggctgcttatggtgacaatctaagattgttatcatatagctattggattggccatccggtgactaacagagatctcatatacctttttgttggttttactaaattaaatattaccacgttcaagacacttctccttatcatacaactaaatagtgagaagagaaa

SEQ ID NO: 23563 - DNA, 545 bp, synthetic construct
  source 1..545: mol_type = other DNA
tgtctccacggttgaaaatggcagatccgttacccgctttggtacttcgagaaacctagtatcaccttggaatcttcgatgcgttgcgctcagcactcaaccccagagtgtagcttaggtcgatgagtctggacgatcctcactggtgacagtggtccaggctgcgttggcggcctacctgtggtgaaaaccacaggacgctagttgtgaacaaggtgtgaagagtctattgagctaccaaagagtcctccggcccctgaatgcggctaatcctaaccacggagcaagtgccttcaaaccagtaggtagcttgtcgtaacgcgcaagtctgtggcggaaccgactactttgggtgtccgtgtttccttttattttatcatggctgcttatggtgacaatctaagattgttatcatatagctattggattggccatccggtgactaacagagatctcatatacctttttgttggttttactaaattaaatattaccacgttcaagacacttctccttatcatacaactaaatagtgagaagagaaa

SEQ ID NO: 23564 - DNA, 695 bp, synthetic construct
  source 1..695: mol_type = other DNA
cacactgatttcacggaatctttgtgcgcctgttttatatccctcccccaatacagtaacttagaagttagaaacctacacgaccaatagcaggcgtgacgcaccagtcatgtcttggtcaaacacttctgtttccccggactgagtatcaataagccgctcacgcggctgaaggagaaaacgttcgttatccggctaactacttcgagaaacctagtagcaccgtgaaagttgcagagtgtttcgctcagcactttccccgtgtagatcaggtcgatgagtcactgcatcccccacgggcgaccgtggcagtggctgcgttggcggcctgcctatggggcaacccatgggacgctctaatacagacatggtgtgaagagtctattgagctagttagtagtcctccggcccctgaatgcggctaatcctaactgcggagcacgcaccctcaatccagggggcggcgtgtcgtaacgggtaactctgcagcggaaccgactactttgggtgtccgtgtttccttttatcacttactggctgcttatggtgacaatcaaagaattgttaccatatagcttttggattggccatccggtgtctaacagagctattgtttacctgtttgttggatacattcctctcaactacaaagttcttcaaactctcaactttatattgctccttaatcataagaa

SEQ ID NO: 23565 - DNA, 645 bp, synthetic construct
  source 1..645: mol_type = other DNA
atacagtaacttagaagttagaaacctacacgaccaatagcaggcgtgacgcaccagtcatgtcttggtcaaacacttctgtttccccggactgagtatcaataagccgctcacgcggctgaaggagaaaacgttcgttatccggctaactacttcgagaaacctagtagcaccgtgaaagttgcagagtgtttcgctcagcactttccccgtgtagatcaggtcgatgagtcactgcatcccccacgggcgaccgtggcagtggctgcgttggcggcctgcctatggggcaacccatgggacgctctaatacagacatggtgtgaagagtctattgagctagttagtagtcctccggcccctgaatgcggctaatcctaactgcggagcacgcaccctcaatccagggggcggcgtgtcgtaacgggtaactctgcagcggaaccgactactttgggtgtccgtgtttccttttatcacttactggctgcttatggtgacaatcaaagaattgttaccatatagcttttggattggccatccggtgtctaacagagctattgtttacctgtttgttggatacattcctctcaactacaaagttcttcaaactctcaactttatattgctccttaatcataagaa

SEQ ID NO: 23566 - DNA, 595 bp, synthetic construct
  source 1..595: mol_type = other DNA
gcaccagtcatgtcttggtcaaacacttctgtttccccggactgagtatcaataagccgctcacgcggctgaaggagaaaacgttcgttatccggctaactacttcgagaaacctagtagcaccgtgaaagttgcagagtgtttcgctcagcactttccccgtgtagatcaggtcgatgagtcactgcatcccccacgggcgaccgtggcagtggctgcgttggcggcctgcctatggggcaacccatgggacgctctaatacagacatggtgtgaagagtctattgagctagttagtagtcctccggcccctgaatgcggctaatcctaactgcggagcacgcaccctcaatccagggggcggcgtgtcgtaacgggtaactctgcagcggaaccgactactttgggtgtccgtgtttccttttatcacttactggctgcttatggtgacaatcaaagaattgttaccatatagcttttggattggccatccggtgtctaacagagctattgtttacctgtttgttggatacattcctctcaactacaaagttcttcaaactctcaactttatattgctccttaatcataagaa

SEQ ID NO: 23567 - DNA, 545 bp, synthetic construct
  source 1..545: mol_type = other DNA
aataagccgctcacgcggctgaaggagaaaacgttcgttatccggctaactacttcgagaaacctagtagcaccgtgaaagttgcagagtgtttcgctcagcactttccccgtgtagatcaggtcgatgagtcactgcatcccccacgggcgaccgtggcagtggctgcgttggcggcctgcctatggggcaacccatgggacgctctaatacagacatggtgtgaagagtctattgagctagttagtagtcctccggcccctgaatgcggctaatcctaactgcggagcacgcaccctcaatccagggggcggcgtgtcgtaacgggtaactctgcagcggaaccgactactttgggtgtccgtgtttccttttatcacttactggctgcttatggtgacaatcaaagaattgttaccatatagcttttggattggccatccggtgtctaacagagctattgtttacctgtttgttggatacattcctctcaactacaaagttcttcaaactctcaactttatattgctccttaatcataagaa

SEQ ID NO: 23568 - DNA, 695 bp, synthetic construct
  source 1..695: mol_type = other DNA
cactctgattttgcgggatctttgtgcgcctgttttataatcccttccctaagcagtaacttagaagttctacacaatcaggaccaacagtcagcgtggcacgccagccacgttttggtcaagcacctctgtttccccggactgagtatcaatagactgctcacgcggttgaaggagaaaacgttcgttacccggctaactacttcgagaaacctaatagcaccatgaaagttgcggagtgtttcgctcagcacttcccccgtgtagatcaggtcgatgagtcactgtaaaccccacgggcgaccgtgacagtggctgcgttggcggcctgcccatggggtaacccatgggacgctctaatacggacatggtgtgaagagtctattgagctagttagtagtcctccggcccctgaatgcggctaatcctaactgcggagcatgcgccctcaacccagggggtggcatgtcgtaatgggcaactctgcagcggaaccgactactttgggtgtccgtgtttccttttattcctcattggctgcttatggtgacaattgaaaggttgttaccatatagctattggattggccatccggtgtctaacagagctattgtttacctattcattgggtttgtccctcttaatcttaagaccatccaaactcttgattacatattgctcctcaattgtagaag

SEQ ID NO: 23569 - DNA, 645 bp, synthetic construct
  source 1..645: mol_type = other DNA
aagcagtaacttagaagttctacacaatcaggaccaacagtcagcgtggcacgccagccacgttttggtcaagcacctctgtttccccggactgagtatcaatagactgctcacgcggttgaaggagaaaacgttcgttacccggctaactacttcgagaaacctaatagcaccatgaaagttgcggagtgtttcgctcagcacttcccccgtgtagatcaggtcgatgagtcactgtaaaccccacgggcgaccgtgacagtggctgcgttggcggcctgcccatggggtaacccatgggacgctctaatacggacatggtgtgaagagtctattgagctagttagtagtcctccggcccctgaatgcggctaatcctaactgcggagcatgcgccctcaacccagggggtggcatgtcgtaatgggcaactctgcagcggaaccgactactttgggtgtccgtgtttccttttattcctcattggctgcttatggtgacaattgaaaggttgttaccatatagctattggattggccatccggtgtctaacagagctattgtttacctattcattgggtttgtccctcttaatcttaagaccatccaaactcttgattacatattgctcctcaattgtagaag

SEQ ID NO: 23570 - DNA, 595 bp, synthetic construct
  source 1..595: mol_type = other DNA
acgccagccacgttttggtcaagcacctctgtttccccggactgagtatcaatagactgctcacgcggttgaaggagaaaacgttcgttacccggctaactacttcgagaaacctaatagcaccatgaaagttgcggagtgtttcgctcagcacttcccccgtgtagatcaggtcgatgagtcactgtaaaccccacgggcgaccgtgacagtggctgcgttggcggcctgcccatggggtaacccatgggacgctctaatacggacatggtgtgaagagtctattgagctagttagtagtcctccggcccctgaatgcggctaatcctaactgcggagcatgcgccctcaacccagggggtggcatgtcgtaatgggcaactctgcagcggaaccgactactttgggtgtccgtgtttccttttattcctcattggctgcttatggtgacaattgaaaggttgttaccatatagctattggattggccatccggtgtctaacagagctattgtttacctattcattgggtttgtccctcttaatcttaagaccatccaaactcttgattacatattgctcctcaattgtagaag

SEQ ID NO: 23571 - DNA, 545 bp, synthetic construct
  source 1..545: mol_type = other DNA
aatagactgctcacgcggttgaaggagaaaacgttcgttacccggctaactacttcgagaaacctaatagcaccatgaaagttgcggagtgtttcgctcagcacttcccccgtgtagatcaggtcgatgagtcactgtaaaccccacgggcgaccgtgacagtggctgcgttggcggcctgcccatggggtaacccatgggacgctctaatacggacatggtgtgaagagtctattgagctagttagtagtcctccggcccctgaatgcggctaatcctaactgcggagcatgcgccctcaacccagggggtggcatgtcgtaatgggcaactctgcagcggaaccgactactttgggtgtccgtgtttccttttattcctcattggctgcttatggtgacaattgaaaggttgttaccatatagctattggattggccatccggtgtctaacagagctattgtttacctattcattgggtttgtccctcttaatcttaagaccatccaaactcttgattacatattgctcctcaattgtagaag

SEQ ID NO: 23572 - DNA, 695 bp, synthetic construct
  source 1..695: mol_type = other DNA
cactctggtactacggtacctttgtgtgcctgttttaagcccctaccccccactcgtaacttagaaggcttctcacactcgatcaatagtaggtgtggcacgccagtcacaccgtgatcaagcacttctgttaccccggtctgagtaccaataagctgctaacgcggctgaaggggaaaacgatcgttatccggctaactacttcgagaaacccagtaccaccatgaacgttgcagggtgtttcgctcggcacaaccccagtgtagatcaggtcgatgagtcaccgtattccccacgggcgaccgtggcggtggctgcgttggcggcctgcccatggggtgacccatgggacgctctaatactgacatggtgcgaagagtctattgagctagttagtagtcctccggcccctgaatgcggctaatcctaactgcggagcacatacccttaatccaaagggcagtgtgtcgtaacgggcaactctgcagcggaaccgactactttgggtgtccgtgtttccttttattcttacattggctgcttatggtgacaattgaaaagttgttaccatatagctattggattggccatccggtgacaaatagagctattgtatatctttttgttggttacgtaccccttaattacaaagtggtttcaactttgaaatacatcctaacactaaattgtagaaa

SEQ ID NO: 23573 - DNA, 645 bp, synthetic construct
  source 1..645: mol_type = other DNA
cactcgtaacttagaaggcttctcacactcgatcaatagtaggtgtggcacgccagtcacaccgtgatcaagcacttctgttaccccggtctgagtaccaataagctgctaacgcggctgaaggggaaaacgatcgttatccggctaactacttcgagaaacccagtaccaccatgaacgttgcagggtgtttcgctcggcacaaccccagtgtagatcaggtcgatgagtcaccgtattccccacgggcgaccgtggcggtggctgcgttggcggcctgcccatggggtgacccatgggacgctctaatactgacatggtgcgaagagtctattgagctagttagtagtcctccggcccctgaatgcggctaatcctaactgcggagcacatacccttaatccaaagggcagtgtgtcgtaacgggcaactctgcagcggaaccgactactttgggtgtccgtgtttccttttattcttacattggctgcttatggtgacaattgaaaagttgttaccatatagctattggattggccatccggtgacaaatagagctattgtatatctttttgttggttacgtaccccttaattacaaagtggtttcaactttgaaatacatcctaacactaaattgtagaaa

SEQ ID NO: 23574 - DNA, 595 bp, synthetic construct
  source 1..595: mol_type = other DNA
cgccagtcacaccgtgatcaagcacttctgttaccccggtctgagtaccaataagctgctaacgcggctgaaggggaaaacgatcgttatccggctaactacttcgagaaacccagtaccaccatgaacgttgcagggtgtttcgctcggcacaaccccagtgtagatcaggtcgatgagtcaccgtattccccacgggcgaccgtggcggtggctgcgttggcggcctgcccatggggtgacccatgggacgctctaatactgacatggtgcgaagagtctattgagctagttagtagtcctccggcccctgaatgcggctaatcctaactgcggagcacatacccttaatccaaagggcagtgtgtcgtaacgggcaactctgcagcggaaccgactactttgggtgtccgtgtttccttttattcttacattggctgcttatggtgacaattgaaaagttgttaccatatagctattggattggccatccggtgacaaatagagctattgtatatctttttgttggttacgtaccccttaattacaaagtggtttcaactttgaaatacatcctaacactaaattgtagaaa

SEQ ID NO: 23575 - DNA, 545 bp, synthetic construct
  source 1..545: mol_type = other DNA
ataagctgctaacgcggctgaaggggaaaacgatcgttatccggctaactacttcgagaaacccagtaccaccatgaacgttgcagggtgtttcgctcggcacaaccccagtgtagatcaggtcgatgagtcaccgtattccccacgggcgaccgtggcggtggctgcgttggcggcctgcccatggggtgacccatgggacgctctaatactgacatggtgcgaagagtctattgagctagttagtagtcctccggcccctgaatgcggctaatcctaactgcggagcacatacccttaatccaaagggcagtgtgtcgtaacgggcaactctgcagcggaaccgactactttgggtgtccgtgtttccttttattcttacattggctgcttatggtgacaattgaaaagttgttaccatatagctattggattggccatccggtgacaaatagagctattgtatatctttttgttggttacgtaccccttaattacaaagtggtttcaactttgaaatacatcctaacactaaattgtagaaa

SEQ ID NO: 23576 - DNA, 695 bp, synthetic construct
  source 1..695: mol_type = other DNA
gtacaccggtatcacggtacccttgtacgcctgttttatacccccttcccccgtaacttagaagctacacaccaagttcaatagaagggggtacaaaccagtaccaccgcgaacaagcacttctgtttccccggtgaagttgcatagactgtgcccacggttgaaagcgaccgatccgttacccgccttggtacttcgagaaacccagtaccactttggaatcaatgatgcgttgcgctcagcgctcgaacccggagcgtagcttaggctgatgagtctggacattccccactggtgacagtggtccaggctgcgttggcggcctacctgtggtgaaagccacaggacgctagttgtgaacaaggtgcgaagagtctattgagctaccatggagtcctccggcccctgaatgcggctaatcccaaccacggagcaggcactcacaagccagtgagacgcttgtcgtaatgcgaaagtctgtggcggaaccgactactttgggtgtccgtgtttccttttattctttgtatggctgcttatggtgacaatcgaagattgttatcataaagcaagttggattggccatccggtgagaattaaaagcattatttacttgcttattggattcactccaatcacatcatttactccacatctaatcaatcttgtgttgatactcagaaggtgttatcaaa

SEQ ID NO: 23577 - DNA, 645 bp, synthetic construct
  source 1..645: mol_type = other DNA
ccgtaacttagaagctacacaccaagttcaatagaagggggtacaaaccagtaccaccgcgaacaagcacttctgtttccccggtgaagttgcatagactgtgcccacggttgaaagcgaccgatccgttacccgccttggtacttcgagaaacccagtaccactttggaatcaatgatgcgttgcgctcagcgctcgaacccggagcgtagcttaggctgatgagtctggacattccccactggtgacagtggtccaggctgcgttggcggcctacctgtggtgaaagccacaggacgctagttgtgaacaaggtgcgaagagtctattgagctaccatggagtcctccggcccctgaatgcggctaatcccaaccacggagcaggcactcacaagccagtgagacgcttgtcgtaatgcgaaagtctgtggcggaaccgactactttgggtgtccgtgtttccttttattctttgtatggctgcttatggtgacaatcgaagattgttatcataaagcaagttggattggccatccggtgagaattaaaagcattatttacttgcttattggattcactccaatcacatcatttactccacatctaatcaatcttgtgttgatactcagaaggtgttatcaaa

SEQ ID NO: 23578 - DNA, 595 bp, synthetic construct
  source 1..595: mol_type = other DNA
gtaccaccgcgaacaagcacttctgtttccccggtgaagttgcatagactgtgcccacggttgaaagcgaccgatccgttacccgccttggtacttcgagaaacccagtaccactttggaatcaatgatgcgttgcgctcagcgctcgaacccggagcgtagcttaggctgatgagtctggacattccccactggtgacagtggtccaggctgcgttggcggcctacctgtggtgaaagccacaggacgctagttgtgaacaaggtgcgaagagtctattgagctaccatggagtcctccggcccctgaatgcggctaatcccaaccacggagcaggcactcacaagccagtgagacgcttgtcgtaatgcgaaagtctgtggcggaaccgactactttgggtgtccgtgtttccttttattctttgtatggctgcttatggtgacaatcgaagattgttatcataaagcaagttggattggccatccggtgagaattaaaagcattatttacttgcttattggattcactccaatcacatcatttactccacatctaatcaatcttgtgttgatactcagaaggtgttatcaaa

SEQ ID NO: 23579 - DNA, 545 bp, synthetic construct
  source 1..545: mol_type = other DNA
gtgcccacggttgaaagcgaccgatccgttacccgccttggtacttcgagaaacccagtaccactttggaatcaatgatgcgttgcgctcagcgctcgaacccggagcgtagcttaggctgatgagtctggacattccccactggtgacagtggtccaggctgcgttggcggcctacctgtggtgaaagccacaggacgctagttgtgaacaaggtgcgaagagtctattgagctaccatggagtcctccggcccctgaatgcggctaatcccaaccacggagcaggcactcacaagccagtgagacgcttgtcgtaatgcgaaagtctgtggcggaaccgactactttgggtgtccgtgtttccttttattctttgtatggctgcttatggtgacaatcgaagattgttatcataaagcaagttggattggccatccggtgagaattaaaagcattatttacttgcttattggattcactccaatcacatcatttactccacatctaatcaatcttgtgttgatactcagaaggtgttatcaaa

SEQ ID NO: 23580 - DNA, 695 bp, synthetic construct
  source 1..695: mol_type = other DNA
gtacactggtattacggtacccttgtacgcctgttttacaccccttcccccgtaacttagaagctttaaacccaagttcaatagtaggtggtacaacccagtaccaccacgaacaagcacttctgttatcccggtgagattgcataagctgtccccacggctaaaagcgattgatccgttacccgctcttgtacttcgagaagcctagtaaaaccttggaatcttcgacgcgttgcgttcgacactcaaccccagagtgtagcttaggctgatgagtctggacattcctcaccggcgacggtggtccaggctgcgttggcggcctacctgtggcctaaagccacaggacgctagttgtgaacaaggtgtgaagagcctattgagctacaagggagtcctccggcccctgaatgcggctaatcccaaccacggagcaggtggttgcaatccagcaactggcctgtcgtaacgcgcaagtctgtggcggaaccgactactttgggtgtccgtgtttccttttattttttaatggctgcttatggtgacaatcacagattgttgtcataaagcgaattggattggccatccagtgagagttaagataattatctacttgtttattggatttgttcctataaccgcccatacaccttgcttgattgaagtgatcctgtcaataagacatcactattaca

SEQ ID NO: 23581 - DNA, 645 bp, synthetic construct
  source 1..645: mol_type = other DNA
cgtaacttagaagctttaaacccaagttcaatagtaggtggtacaacccagtaccaccacgaacaagcacttctgttatcccggtgagattgcataagctgtccccacggctaaaagcgattgatccgttacccgctcttgtacttcgagaagcctagtaaaaccttggaatcttcgacgcgttgcgttcgacactcaaccccagagtgtagcttaggctgatgagtctggacattcctcaccggcgacggtggtccaggctgcgttggcggcctacctgtggcctaaagccacaggacgctagttgtgaacaaggtgtgaagagcctattgagctacaagggagtcctccggcccctgaatgcggctaatcccaaccacggagcaggtggttgcaatccagcaactggcctgtcgtaacgcgcaagtctgtggcggaaccgactactttgggtgtccgtgtttccttttattttttaatggctgcttatggtgacaatcacagattgttgtcataaagcgaattggattggccatccagtgagagttaagataattatctacttgtttattggatttgttcctataaccgcccatacaccttgcttgattgaagtgatcctgtcaataagacatcactattaca

SEQ ID NO: 23582 - DNA, 595 bp, synthetic construct
  source 1..595: mol_type = other DNA
gtaccaccacgaacaagcacttctgttatcccggtgagattgcataagctgtccccacggctaaaagcgattgatccgttacccgctcttgtacttcgagaagcctagtaaaaccttggaatcttcgacgcgttgcgttcgacactcaaccccagagtgtagcttaggctgatgagtctggacattcctcaccggcgacggtggtccaggctgcgttggcggcctacctgtggcctaaagccacaggacgctagttgtgaacaaggtgtgaagagcctattgagctacaagggagtcctccggcccctgaatgcggctaatcccaaccacggagcaggtggttgcaatccagcaactggcctgtcgtaacgcgcaagtctgtggcggaaccgactactttgggtgtccgtgtttccttttattttttaatggctgcttatggtgacaatcacagattgttgtcataaagcgaattggattggccatccagtgagagttaagataattatctacttgtttattggatttgttcctataaccgcccatacaccttgcttgattgaagtgatcctgtcaataagacatcactattaca

SEQ ID NO: 23583 - DNA, 545 bp, synthetic construct
  source 1..545: mol_type = other DNA
gtccccacggctaaaagcgattgatccgttacccgctcttgtacttcgagaagcctagtaaaaccttggaatcttcgacgcgttgcgttcgacactcaaccccagagtgtagcttaggctgatgagtctggacattcctcaccggcgacggtggtccaggctgcgttggcggcctacctgtggcctaaagccacaggacgctagttgtgaacaaggtgtgaagagcctattgagctacaagggagtcctccggcccctgaatgcggctaatcccaaccacggagcaggtggttgcaatccagcaactggcctgtcgtaacgcgcaagtctgtggcggaaccgactactttgggtgtccgtgtttccttttattttttaatggctgcttatggtgacaatcacagattgttgtcataaagcgaattggattggccatccagtgagagttaagataattatctacttgtttattggatttgttcctataaccgcccatacaccttgcttgattgaagtgatcctgtcaataagacatcactattaca

SEQ ID NO: 23584 - DNA, 695 bp, synthetic construct
  source 1..695: mol_type = other DNA
gtactccggtattgcggtacccttgtacgcctgttttacactcccttccccggtaacttagaagtaaacaaaccaagttcaatagaagggggtacaaaccagtaccaccacgaacaagcacttctgtttccccggtgacgttgtatagactgtacccacggttgaaaacaactgatccgttatccgctcttgtacttcgagaagcccagtatcaccttggaatcttcgatgcgttgcgctcagcactcaaccccagagtgtagcttaggtcgatgagtctggacaatcctcaccggcgacggtggtccaggctgcgttggcggcctacctgtggcccaaagccacaggacgctagttgtgaacaaggtgtgaagagcctattgagctacgagagagtcctccggcccctgaatgcggctaatcccaaccacggagcaggtgatcacaagccagtgattagcctgtcgtaacgcgcaagtctgtggcggaaccgactactttgggtgtccgtgtttcctttattttattatggctgcttatggtgacaatcacagattgttatcataaagcgacttggattggccatccagtgaaaataaaacacatcatttacctgattgttggatttactccgctgactatctactcaccaggtcttattaaggttattctgttgattaggtcacaatttcaca

SEQ ID NO: 23585 - DNA, 645 bp, synthetic construct
  source 1..645: mol_type = other DNA
cggtaacttagaagtaaacaaaccaagttcaatagaagggggtacaaaccagtaccaccacgaacaagcacttctgtttccccggtgacgttgtatagactgtacccacggttgaaaacaactgatccgttatccgctcttgtacttcgagaagcccagtatcaccttggaatcttcgatgcgttgcgctcagcactcaaccccagagtgtagcttaggtcgatgagtctggacaatcctcaccggcgacggtggtccaggctgcgttggcggcctacctgtggcccaaagccacaggacgctagttgtgaacaaggtgtgaagagcctattgagctacgagagagtcctccggcccctgaatgcggctaatcccaaccacggagcaggtgatcacaagccagtgattagcctgtcgtaacgcgcaagtctgtggcggaaccgactactttgggtgtccgtgtttcctttattttattatggctgcttatggtgacaatcacagattgttatcataaagcgacttggattggccatccagtgaaaataaaacacatcatttacctgattgttggatttactccgctgactatctactcaccaggtcttattaaggttattctgttgattaggtcacaatttcaca

SEQ ID NO: 23586 - DNA, 595 bp, synthetic construct
  source 1..595: mol_type = other DNA
agtaccaccacgaacaagcacttctgtttccccggtgacgttgtatagactgtacccacggttgaaaacaactgatccgttatccgctcttgtacttcgagaagcccagtatcaccttggaatcttcgatgcgttgcgctcagcactcaaccccagagtgtagcttaggtcgatgagtctggacaatcctcaccggcgacggtggtccaggctgcgttggcggcctacctgtggcccaaagccacaggacgctagttgtgaacaaggtgtgaagagcctattgagctacgagagagtcctccggcccctgaatgcggctaatcccaaccacggagcaggtgatcacaagccagtgattagcctgtcgtaacgcgcaagtctgtggcggaaccgactactttgggtgtccgtgtttcctttattttattatggctgcttatggtgacaatcacagattgttatcataaagcgacttggattggccatccagtgaaaataaaacacatcatttacctgattgttggatttactccgctgactatctactcaccaggtcttattaaggttattctgttgattaggtcacaatttcaca

SEQ ID NO: 23587 - DNA, 545 bp, synthetic construct
  source 1..545: mol_type = other DNA
tgtacccacggttgaaaacaactgatccgttatccgctcttgtacttcgagaagcccagtatcaccttggaatcttcgatgcgttgcgctcagcactcaaccccagagtgtagcttaggtcgatgagtctggacaatcctcaccggcgacggtggtccaggctgcgttggcggcctacctgtggcccaaagccacaggacgctagttgtgaacaaggtgtgaagagcctattgagctacgagagagtcctccggcccctgaatgcggctaatcccaaccacggagcaggtgatcacaagccagtgattagcctgtcgtaacgcgcaagtctgtggcggaaccgactactttgggtgtccgtgtttcctttattttattatggctgcttatggtgacaatcacagattgttatcataaagcgacttggattggccatccagtgaaaataaaacacatcatttacctgattgttggatttactccgctgactatctactcaccaggtcttattaaggttattctgttgattaggtcacaatttcaca

SEQ ID NO: 23588 - DNA, 695 bp, synthetic construct
  source 1..695: mol_type = other DNA
gtactccggtattacggtacccttgtacgcctgttttgtatccccttcccccgcaacttagaagttataaaccaagttcaatagaagggggtacaagccagtaccaccacgaacaagcacttctgtttccccggtgatgttgtatagactgctaacgcggttgaaaacagctgatccgttatccgcttgtgtacttcgagaagcctagtatcatcttggaatcttcgatgcgttgcgttcagcgctctaccccagagcgtagcttaggctgatgagtctgggcattccccaccggcgacggtggcccaggctgcgttggcggcctacctatggctaacgccataggacgctagttgtgaacaaggtgtgaagagcctattgagctacacaagagtcctccggcccctgaatgcggctaatcctaaccatggagcaagtgatcacaatccagtgatattcttgtcgtaacgcgcaagtccgtggcggaaccgactactttgggtgtccgtgtttccttttacttttatcatggctgcttatggtgacaatcattgattgttatcataaagcgaattggattggccatccggtgaaagtgagacttatcatctacttgtttgttggattcactccattgaacacattcactcccagtatcatttcaatagtaatcagaattagacagttgtatcaca

SEQ ID NO: 23589 - DNA, 645 bp, synthetic construct
  source 1..645: mol_type = other DNA
ccgcaacttagaagttataaaccaagttcaatagaagggggtacaagccagtaccaccacgaacaagcacttctgtttccccggtgatgttgtatagactgctaacgcggttgaaaacagctgatccgttatccgcttgtgtacttcgagaagcctagtatcatcttggaatcttcgatgcgttgcgttcagcgctctaccccagagcgtagcttaggctgatgagtctgggcattccccaccggcgacggtggcccaggctgcgttggcggcctacctatggctaacgccataggacgctagttgtgaacaaggtgtgaagagcctattgagctacacaagagtcctccggcccctgaatgcggctaatcctaaccatggagcaagtgatcacaatccagtgatattcttgtcgtaacgcgcaagtccgtggcggaaccgactactttgggtgtccgtgtttccttttacttttatcatggctgcttatggtgacaatcattgattgttatcataaagcgaattggattggccatccggtgaaagtgagacttatcatctacttgtttgttggattcactccattgaacacattcactcccagtatcatttcaatagtaatcagaattagacagttgtatcaca

SEQ ID NO: 23590 - DNA, 595 bp, synthetic construct
  source 1..595: mol_type = other DNA
gtaccaccacgaacaagcacttctgtttccccggtgatgttgtatagactgctaacgcggttgaaaacagctgatccgttatccgcttgtgtacttcgagaagcctagtatcatcttggaatcttcgatgcgttgcgttcagcgctctaccccagagcgtagcttaggctgatgagtctgggcattccccaccggcgacggtggcccaggctgcgttggcggcctacctatggctaacgccataggacgctagttgtgaacaaggtgtgaagagcctattgagctacacaagagtcctccggcccctgaatgcggctaatcctaaccatggagcaagtgatcacaatccagtgatattcttgtcgtaacgcgcaagtccgtggcggaaccgactactttgggtgtccgtgtttccttttacttttatcatggctgcttatggtgacaatcattgattgttatcataaagcgaattggattggccatccggtgaaagtgagacttatcatctacttgtttgttggattcactccattgaacacattcactcccagtatcatttcaatagtaatcagaattagacagttgtatcaca

SEQ ID NO: 23591 - DNA, 545 bp, synthetic construct
  source 1..545: mol_type = other DNA
gctaacgcggttgaaaacagctgatccgttatccgcttgtgtacttcgagaagcctagtatcatcttggaatcttcgatgcgttgcgttcagcgctctaccccagagcgtagcttaggctgatgagtctgggcattccccaccggcgacggtggcccaggctgcgttggcggcctacctatggctaacgccataggacgctagttgtgaacaaggtgtgaagagcctattgagctacacaagagtcctccggcccctgaatgcggctaatcctaaccatggagcaagtgatcacaatccagtgatattcttgtcgtaacgcgcaagtccgtggcggaaccgactactttgggtgtccgtgtttccttttacttttatcatggctgcttatggtgacaatcattgattgttatcataaagcgaattggattggccatccggtgaaagtgagacttatcatctacttgtttgttggattcactccattgaacacattcactcccagtatcatttcaatagtaatcagaattagacagttgtatcaca

SEQ ID NO: 23592 - DNA, 695 bp, synthetic construct
  source 1..695: mol_type = other DNA
gtactccggtattacggtacccttgtacgcctgttttaaatccccttccccgtaacttagaagcttaaaccaataagttcaatagaagggggtacaaaccagtaccaccacgaacaagcacttctgtttccccggtgcggtggtatagactgtacccacggttaaaaaccaccaatccgttatccgctctggtacttcgagaagcctagtaccaccttggaatctttgacgcgttgcgctcaacactcaaccccagagtgtagcttaggctgatgagtctgggcagtccccaccggtgacggtggcccaggctgcgttggcggcctacccatggctaatgccatgggacgctagaagtgaacaaggtgtgaagagcctattgagctactagagagtcctccggcccctgaatgcggctaatcccaaccacggatcaagtgcgcgcaacccagtgcgtagcttgtcgtaatgcgcaagtctgtggcggaaccgactactttgggtgtccgtgtttccttttattcttattatggctgcttatggtgacaatcttagattgttatcatatagcaattggattggccatccagtgagagtgagagatatcatatacctatttgtagcttttactccacttagcacgaacacagttactttgattagaattgtgctattgatcagattgacacatcact

SEQ ID NO: 23593 - DNA, 645 bp, synthetic construct
  source 1..645: mol_type = other DNA
cgtaacttagaagcttaaaccaataagttcaatagaagggggtacaaaccagtaccaccacgaacaagcacttctgtttccccggtgcggtggtatagactgtacccacggttaaaaaccaccaatccgttatccgctctggtacttcgagaagcctagtaccaccttggaatctttgacgcgttgcgctcaacactcaaccccagagtgtagcttaggctgatgagtctgggcagtccccaccggtgacggtggcccaggctgcgttggcggcctacccatggctaatgccatgggacgctagaagtgaacaaggtgtgaagagcctattgagctactagagagtcctccggcccctgaatgcggctaatcccaaccacggatcaagtgcgcgcaacccagtgcgtagcttgtcgtaatgcgcaagtctgtggcggaaccgactactttgggtgtccgtgtttccttttattcttattatggctgcttatggtgacaatcttagattgttatcatatagcaattggattggccatccagtgagagtgagagatatcatatacctatttgtagcttttactccacttagcacgaacacagttactttgattagaattgtgctattgatcagattgacacatcact

SEQ ID NO: 23594 - DNA, 595 bp, synthetic construct
  source 1..595: mol_type = other DNA
agtaccaccacgaacaagcacttctgtttccccggtgcggtggtatagactgtacccacggttaaaaaccaccaatccgttatccgctctggtacttcgagaagcctagtaccaccttggaatctttgacgcgttgcgctcaacactcaaccccagagtgtagcttaggctgatgagtctgggcagtccccaccggtgacggtggcccaggctgcgttggcggcctacccatggctaatgccatgggacgctagaagtgaacaaggtgtgaagagcctattgagctactagagagtcctccggcccctgaatgcggctaatcccaaccacggatcaagtgcgcgcaacccagtgcgtagcttgtcgtaatgcgcaagtctgtggcggaaccgactactttgggtgtccgtgtttccttttattcttattatggctgcttatggtgacaatcttagattgttatcatatagcaattggattggccatccagtgagagtgagagatatcatatacctatttgtagcttttactccacttagcacgaacacagttactttgattagaattgtgctattgatcagattgacacatcact

SEQ ID NO: 23595 - DNA, 545 bp, synthetic construct
  source 1..545: mol_type = other DNA
tgtacccacggttaaaaaccaccaatccgttatccgctctggtacttcgagaagcctagtaccaccttggaatctttgacgcgttgcgctcaacactcaaccccagagtgtagcttaggctgatgagtctgggcagtccccaccggtgacggtggcccaggctgcgttggcggcctacccatggctaatgccatgggacgctagaagtgaacaaggtgtgaagagcctattgagctactagagagtcctccggcccctgaatgcggctaatcccaaccacggatcaagtgcgcgcaacccagtgcgtagcttgtcgtaatgcgcaagtctgtggcggaaccgactactttgggtgtccgtgtttccttttattcttattatggctgcttatggtgacaatcttagattgttatcatatagcaattggattggccatccagtgagagtgagagatatcatatacctatttgtagcttttactccacttagcacgaacacagttactttgattagaattgtgctattgatcagattgacacatcact

SEQ ID NO: 23596 - DNA, 695 bp, synthetic construct
  source 1..695: mol_type = other DNA
gtactctggtatcacggtacctttgtacgcctgttttatatcccttcccccgtaacttagaagctttgtaccaacaagttcaatagaaggggtacaaaccagtaccaccacgaacaagcacttctgtttccccggtgcgatgacatagactgtacccacggtcaaaagtcaccaatccgttacccgctttggtacttcgagacgcctagtattgccttggaattctcgatgcgttgcgctcaacactcgaccctggagtgtagcttaggctgatgagtctgggcattccccaccggtgacggtggcccaggctgcgttggcggcctacccatagctattgctatgggatgctagagttgaacaaggtgtgaagagccaattgagctactaaagagtcctccggcccctgaatgcggctaatcccaaccacggatcaagtgcgtgcaacccagcacgtagcttgtcgtaatgcgcaagtctgtggcggaaccgactactttgggtgtccgtgtttccttttatttttatcatggctgcttatggtgacaatcttggattgttatcatatagcgattggattggccatccggtgagaataaaagatattgtttatctgtttgtggcttttactccattaaacaaaaacacactttccttaattaaagtggtactattgatcagatcagcataccaca

SEQ ID NO: 23597 - DNA, 645 bp, synthetic construct
  source 1..645: mol_type = other DNA
cgtaacttagaagctttgtaccaacaagttcaatagaaggggtacaaaccagtaccaccacgaacaagcacttctgtttccccggtgcgatgacatagactgtacccacggtcaaaagtcaccaatccgttacccgctttggtacttcgagacgcctagtattgccttggaattctcgatgcgttgcgctcaacactcgaccctggagtgtagcttaggctgatgagtctgggcattccccaccggtgacggtggcccaggctgcgttggcggcctacccatagctattgctatgggatgctagagttgaacaaggtgtgaagagccaattgagctactaaagagtcctccggcccctgaatgcggctaatcccaaccacggatcaagtgcgtgcaacccagcacgtagcttgtcgtaatgcgcaagtctgtggcggaaccgactactttgggtgtccgtgtttccttttatttttatcatggctgcttatggtgacaatcttggattgttatcatatagcgattggattggccatccggtgagaataaaagatattgtttatctgtttgtggcttttactccattaaacaaaaacacactttccttaattaaagtggtactattgatcagatcagcataccaca

SEQ ID NO: 23598 - DNA, 595 bp, synthetic construct
  source 1..595: mol_type = other DNA
agtaccaccacgaacaagcacttctgtttccccggtgcgatgacatagactgtacccacggtcaaaagtcaccaatccgttacccgctttggtacttcgagacgcctagtattgccttggaattctcgatgcgttgcgctcaacactcgaccctggagtgtagcttaggctgatgagtctgggcattccccaccggtgacggtggcccaggctgcgttggcggcctacccatagctattgctatgggatgctagagttgaacaaggtgtgaagagccaattgagctactaaagagtcctccggcccctgaatgcggctaatcccaaccacggatcaagtgcgtgcaacccagcacgtagcttgtcgtaatgcgcaagtctgtggcggaaccgactactttgggtgtccgtgtttccttttatttttatcatggctgcttatggtgacaatcttggattgttatcatatagcgattggattggccatccggtgagaataaaagatattgtttatctgtttgtggcttttactccattaaacaaaaacacactttccttaattaaagtggtactattgatcagatcagcataccaca

SEQ ID NO: 23599 - DNA, 545 bp, synthetic construct
  source 1..545: mol_type = other DNA
tgtacccacggtcaaaagtcaccaatccgttacccgctttggtacttcgagacgcctagtattgccttggaattctcgatgcgttgcgctcaacactcgaccctggagtgtagcttaggctgatgagtctgggcattccccaccggtgacggtggcccaggctgcgttggcggcctacccatagctattgctatgggatgctagagttgaacaaggtgtgaagagccaattgagctactaaagagtcctccggcccctgaatgcggctaatcccaaccacggatcaagtgcgtgcaacccagcacgtagcttgtcgtaatgcgcaagtctgtggcggaaccgactactttgggtgtccgtgtttccttttatttttatcatggctgcttatggtgacaatcttggattgttatcatatagcgattggattggccatccggtgagaataaaagatattgtttatctgtttgtggcttttactccattaaacaaaaacacactttccttaattaaagtggtactattgatcagatcagcataccaca

SEQ ID NO: 23600 - DNA, 695 bp, synthetic construct
  source 1..695: mol_type = other DNA
gcactctggtattgcggtacctttgtgcgcctgttttatatccccgcccctacgtaactttagaagcaatacacagtgttcattaggaggggcacaaaccagtgtccttaagaacaagcacttctgtttccccggtgacctcgtataggctgtacccacggctaaaaacgagcgattcgttacccgcttaggtacttcgagaagcctagtaccgccttggaatcttcgacgcgttgcgctcagcactctaccccgagtgtagcttaggctgatgagtctgggcattccccaccggtgacggtggcccaggctgcgttggcggcctacccatggcctgcgccatgggacgctagttgtgaacaaggtgtgaagagcctattgagctacctaagaatcctccggcccctgaatgcggctaatcctaaccacggagcaagcaccctcaatccagggggtggcttgtcgtaacgcgcaagtctgtggcggaaccgactactttgggtgtccgtgtttccctttatttttattgtggctgcttatggtgacaatctttgattgccatcataaagcgaattggattggccatccggtgaaagttgaacacaccattcatctatttgttggattcacctcgttgactcagtttacacccaatttggtacatatagtgatagtgattagagaaaaataccaca

SEQ ID NO: 23601 - DNA, 645 bp, synthetic construct
  source 1..645: mol_type = other DNA
tacgtaactttagaagcaatacacagtgttcattaggaggggcacaaaccagtgtccttaagaacaagcacttctgtttccccggtgacctcgtataggctgtacccacggctaaaaacgagcgattcgttacccgcttaggtacttcgagaagcctagtaccgccttggaatcttcgacgcgttgcgctcagcactctaccccgagtgtagcttaggctgatgagtctgggcattccccaccggtgacggtggcccaggctgcgttggcggcctacccatggcctgcgccatgggacgctagttgtgaacaaggtgtgaagagcctattgagctacctaagaatcctccggcccctgaatgcggctaatcctaaccacggagcaagcaccctcaatccagggggtggcttgtcgtaacgcgcaagtctgtggcggaaccgactactttgggtgtccgtgtttccctttatttttattgtggctgcttatggtgacaatctttgattgccatcataaagcgaattggattggccatccggtgaaagttgaacacaccattcatctatttgttggattcacctcgttgactcagtttacacccaatttggtacatatagtgatagtgattagagaaaaataccaca

SEQ ID NO: 23602 - DNA, 595 bp, synthetic construct
  source 1..595: mol_type = other DNA
agtgtccttaagaacaagcacttctgtttccccggtgacctcgtataggctgtacccacggctaaaaacgagcgattcgttacccgcttaggtacttcgagaagcctagtaccgccttggaatcttcgacgcgttgcgctcagcactctaccccgagtgtagcttaggctgatgagtctgggcattccccaccggtgacggtggcccaggctgcgttggcggcctacccatggcctgcgccatgggacgctagttgtgaacaaggtgtgaagagcctattgagctacctaagaatcctccggcccctgaatgcggctaatcctaaccacggagcaagcaccctcaatccagggggtggcttgtcgtaacgcgcaagtctgtggcggaaccgactactttgggtgtccgtgtttccctttatttttattgtggctgcttatggtgacaatctttgattgccatcataaagcgaattggattggccatccggtgaaagttgaacacaccattcatctatttgttggattcacctcgttgactcagtttacacccaatttggtacatatagtgatagtgattagagaaaaataccaca

SEQ ID NO: 23603 - DNA, 545 bp, synthetic construct
  source 1..545: mol_type = other DNA
tgtacccacggctaaaaacgagcgattcgttacccgcttaggtacttcgagaagcctagtaccgccttggaatcttcgacgcgttgcgctcagcactctaccccgagtgtagcttaggctgatgagtctgggcattccccaccggtgacggtggcccaggctgcgttggcggcctacccatggcctgcgccatgggacgctagttgtgaacaaggtgtgaagagcctattgagctacctaagaatcctccggcccctgaatgcggctaatcctaaccacggagcaagcaccctcaatccagggggtggcttgtcgtaacgcgcaagtctgtggcggaaccgactactttgggtgtccgtgtttccctttatttttattgtggctgcttatggtgacaatctttgattgccatcataaagcgaattggattggccatccggtgaaagttgaacacaccattcatctatttgttggattcacctcgttgactcagtttacacccaatttggtacatatagtgatagtgattagagaaaaataccaca

SEQ ID NO: 23604 - DNA, 695 bp, synthetic construct
  source 1..695: mol_type = other DNA
gtactctggtattacggtacctttgtacgcctgttttatatcccctccccccagtaacttagaaacaaaaaacccaagttcaataggagggggtacaaaccagtaccaccacgaacaagcacttctgttttccccggtgaggttgtatagactgtccccacggtcgaaaatgactgatccgttacccgctcctgtacttcgagaagcccagtaacatcttggaatcttcgatgcgttgcgctcagcactcaaccccagagtgtagcttaggtcgatgagtctggacgctccccaccggcgacggtggtccaggctgcgttggcggcctacctgtggtccaaagccacaggacgttagttgtgaacaaggtgtgaagagcctattgagctacaagagagtcctccggcccctgaatgcggctaatcccaaccatggagcagatgattgcaaaccagcaattggtctgtcgtaatgcgtaagtctgtggcggaaccgactactttgggtgtccgtgtttcctttttactctttaatggctgcttatggtgacaatcacggattgttatcataaagcgaattggattggccatccggtgagaatcagaacgattatttcttcctcgtggatttgtaccaataacaccttacacaccgcacttaatcagagttatattgtgtgagatttcattaccata

SEQ ID NO: 23605 - DNA, 645 bp, synthetic construct
  source 1..645: mol_type = other DNA
ccagtaacttagaaacaaaaaacccaagttcaataggagggggtacaaaccagtaccaccacgaacaagcacttctgttttccccggtgaggttgtatagactgtccccacggtcgaaaatgactgatccgttacccgctcctgtacttcgagaagcccagtaacatcttggaatcttcgatgcgttgcgctcagcactcaaccccagagtgtagcttaggtcgatgagtctggacgctccccaccggcgacggtggtccaggctgcgttggcggcctacctgtggtccaaagccacaggacgttagttgtgaacaaggtgtgaagagcctattgagctacaagagagtcctccggcccctgaatgcggctaatcccaaccatggagcagatgattgcaaaccagcaattggtctgtcgtaatgcgtaagtctgtggcggaaccgactactttgggtgtccgtgtttcctttttactctttaatggctgcttatggtgacaatcacggattgttatcataaagcgaattggattggccatccggtgagaatcagaacgattatttcttcctcgtggatttgtaccaataacaccttacacaccgcacttaatcagagttatattgtgtgagatttcattaccata

SEQ ID NO: 23606 - DNA, 595 bp, synthetic construct
  source 1..595: mol_type = other DNA
cagtaccaccacgaacaagcacttctgttttccccggtgaggttgtatagactgtccccacggtcgaaaatgactgatccgttacccgctcctgtacttcgagaagcccagtaacatcttggaatcttcgatgcgttgcgctcagcactcaaccccagagtgtagcttaggtcgatgagtctggacgctccccaccggcgacggtggtccaggctgcgttggcggcctacctgtggtccaaagccacaggacgttagttgtgaacaaggtgtgaagagcctattgagctacaagagagtcctccggcccctgaatgcggctaatcccaaccatggagcagatgattgcaaaccagcaattggtctgtcgtaatgcgtaagtctgtggcggaaccgactactttgggtgtccgtgtttcctttttactctttaatggctgcttatggtgacaatcacggattgttatcataaagcgaattggattggccatccggtgagaatcagaacgattatttcttcctcgtggatttgtaccaataacaccttacacaccgcacttaatcagagttatattgtgtgagatttcattaccata

SEQ ID NO: 23607 - DNA, 545 bp, synthetic construct
  source 1..545: mol_type = other DNA
actgtccccacggtcgaaaatgactgatccgttacccgctcctgtacttcgagaagcccagtaacatcttggaatcttcgatgcgttgcgctcagcactcaaccccagagtgtagcttaggtcgatgagtctggacgctccccaccggcgacggtggtccaggctgcgttggcggcctacctgtggtccaaagccacaggacgttagttgtgaacaaggtgtgaagagcctattgagctacaagagagtcctccggcccctgaatgcggctaatcccaaccatggagcagatgattgcaaaccagcaattggtctgtcgtaatgcgtaagtctgtggcggaaccgactactttgggtgtccgtgtttcctttttactctttaatggctgcttatggtgacaatcacggattgttatcataaagcgaattggattggccatccggtgagaatcagaacgattatttcttcctcgtggatttgtaccaataacaccttacacaccgcacttaatcagagttatattgtgtgagatttcattaccata

SEQ ID NO: 23608 - DNA, 695 bp, synthetic construct
  source 1..695: mol_type = other DNA
gcactctggtatcacggtacctttgtgcgcctgttttatgtccccgcccccatgtaactttagaagcaatacacggtgttcattaggaggggcacaagccagtgttcctatgaacaagcacttctgtttccccggtgacctcgtataggctgtgcccacggctaaaaacgtgcgatccgttacccgcttgggtacttcgagaagcccagtaccaccttggaatcttcgacgcgttgcgctcagcactctaccccgagtgtagcttaggctgatgagtctgggcattccccactggtgacagtggcccaggctgcgttggcggcctacccattgctcgcgcaatgggacgctagatgtgaacaaggtgtgaagagcctattgagctgcctaagagtcctccggcccctgaatgcggctaatcctaaccacggagcaagcgccttcaacccagggggtggcttgtcgtaacgcgcaagtctgtggcggaaccgactactttgggtgtccgtgtttccctttgtttttattatggctgcttatggtgacaatcattgattgccatcataaagcgaattggattggccatccggtggaagttacatacatcatccatctatttgttggatttgcttcactaacacagttcacaatcaacttggtatatataataatagtgattagagaaaaataccata

SEQ ID NO: 23609 - DNA, 645 bp, synthetic construct
  source 1..645: mol_type = other DNA
catgtaactttagaagcaatacacggtgttcattaggaggggcacaagccagtgttcctatgaacaagcacttctgtttccccggtgacctcgtataggctgtgcccacggctaaaaacgtgcgatccgttacccgcttgggtacttcgagaagcccagtaccaccttggaatcttcgacgcgttgcgctcagcactctaccccgagtgtagcttaggctgatgagtctgggcattccccactggtgacagtggcccaggctgcgttggcggcctacccattgctcgcgcaatgggacgctagatgtgaacaaggtgtgaagagcctattgagctgcctaagagtcctccggcccctgaatgcggctaatcctaaccacggagcaagcgccttcaacccagggggtggcttgtcgtaacgcgcaagtctgtggcggaaccgactactttgggtgtccgtgtttccctttgtttttattatggctgcttatggtgacaatcattgattgccatcataaagcgaattggattggccatccggtggaagttacatacatcatccatctatttgttggatttgcttcactaacacagttcacaatcaacttggtatatataataatagtgattagagaaaaataccata

SEQ ID NO: 23610 - DNA, 595 bp, synthetic construct
  source 1..595: mol_type = other DNA
agtgttcctatgaacaagcacttctgtttccccggtgacctcgtataggctgtgcccacggctaaaaacgtgcgatccgttacccgcttgggtacttcgagaagcccagtaccaccttggaatcttcgacgcgttgcgctcagcactctaccccgagtgtagcttaggctgatgagtctgggcattccccactggtgacagtggcccaggctgcgttggcggcctacccattgctcgcgcaatgggacgctagatgtgaacaaggtgtgaagagcctattgagctgcctaagagtcctccggcccctgaatgcggctaatcctaaccacggagcaagcgccttcaacccagggggtggcttgtcgtaacgcgcaagtctgtggcggaaccgactactttgggtgtccgtgtttccctttgtttttattatggctgcttatggtgacaatcattgattgccatcataaagcgaattggattggccatccggtggaagttacatacatcatccatctatttgttggatttgcttcactaacacagttcacaatcaacttggtatatataataatagtgattagagaaaaataccata

SEQ ID NO: 23611 - DNA, 545 bp, synthetic construct
  source 1..545: mol_type = other DNA
tgtgcccacggctaaaaacgtgcgatccgttacccgcttgggtacttcgagaagcccagtaccaccttggaatcttcgacgcgttgcgctcagcactctaccccgagtgtagcttaggctgatgagtctgggcattccccactggtgacagtggcccaggctgcgttggcggcctacccattgctcgcgcaatgggacgctagatgtgaacaaggtgtgaagagcctattgagctgcctaagagtcctccggcccctgaatgcggctaatcctaaccacggagcaagcgccttcaacccagggggtggcttgtcgtaacgcgcaagtctgtggcggaaccgactactttgggtgtccgtgtttccctttgtttttattatggctgcttatggtgacaatcattgattgccatcataaagcgaattggattggccatccggtggaagttacatacatcatccatctatttgttggatttgcttcactaacacagttcacaatcaacttggtatatataataatagtgattagagaaaaataccata

SEQ ID NO: 23612 - DNA, 695 bp, synthetic construct
  source 1..695: mol_type = other DNA
gtactctggtatctcggtacctttgtacgcctgttttatacccccttccccatgtaactttagaagcaattcaacaagttcaatagagggggtacaaaccagtaccaccacgaacaagcacttctgtttccccggtgattttacataagctgtgcccacggctgaaagtgaatgatccgttacccgcttgagtacttcgagaagcctagtatcgccttggaatcttcgatgcgttgcgctcagcactctaccccgagtgtagcttaggctgatgagtctgggcattccccaccggtgacggtggcccaggctgcgttggcggcctacccatggctaacgccatgggacgctagttgtgaacaaggtgtgaagagcctattgagctacttaagagtcctccggcccctgaatgcggctaatcccaaccacggagcaggcgccaccaatccaggaggtagcctgtcgtaacgcgtaagtctgtggcggaaccgactactttgggtgtccgtgtttccttttatctctttaatggctgcttatggtgacaatcatagattgttatcataaagcgaattggattggccatccggtgaagtgtaaacacattatttatttgttcattggatttactccattcacccgatttactccaaatataatacatattgtattgttgataagacgttgctactaca

SEQ ID NO: 23613 - DNA, 645 bp, synthetic construct
  source 1..645: mol_type = other DNA
catgtaactttagaagcaattcaacaagttcaatagagggggtacaaaccagtaccaccacgaacaagcacttctgtttccccggtgattttacataagctgtgcccacggctgaaagtgaatgatccgttacccgcttgagtacttcgagaagcctagtatcgccttggaatcttcgatgcgttgcgctcagcactctaccccgagtgtagcttaggctgatgagtctgggcattccccaccggtgacggtggcccaggctgcgttggcggcctacccatggctaacgccatgggacgctagttgtgaacaaggtgtgaagagcctattgagctacttaagagtcctccggcccctgaatgcggctaatcccaaccacggagcaggcgccaccaatccaggaggtagcctgtcgtaacgcgtaagtctgtggcggaaccgactactttgggtgtccgtgtttccttttatctctttaatggctgcttatggtgacaatcatagattgttatcataaagcgaattggattggccatccggtgaagtgtaaacacattatttatttgttcattggatttactccattcacccgatttactccaaatataatacatattgtattgttgataagacgttgctactaca

SEQ ID NO: 23614 - DNA, 595 bp, synthetic construct
  source 1..595: mol_type = other DNA
agtaccaccacgaacaagcacttctgtttccccggtgattttacataagctgtgcccacggctgaaagtgaatgatccgttacccgcttgagtacttcgagaagcctagtatcgccttggaatcttcgatgcgttgcgctcagcactctaccccgagtgtagcttaggctgatgagtctgggcattccccaccggtgacggtggcccaggctgcgttggcggcctacccatggctaacgccatgggacgctagttgtgaacaaggtgtgaagagcctattgagctacttaagagtcctccggcccctgaatgcggctaatcccaaccacggagcaggcgccaccaatccaggaggtagcctgtcgtaacgcgtaagtctgtggcggaaccgactactttgggtgtccgtgtttccttttatctctttaatggctgcttatggtgacaatcatagattgttatcataaagcgaattggattggccatccggtgaagtgtaaacacattatttatttgttcattggatttactccattcacccgatttactccaaatataatacatattgtattgttgataagacgttgctactaca

SEQ ID NO: 23615 - DNA, 545 bp, synthetic construct
  source 1..545: mol_type = other DNA
tgtgcccacggctgaaagtgaatgatccgttacccgcttgagtacttcgagaagcctagtatcgccttggaatcttcgatgcgttgcgctcagcactctaccccgagtgtagcttaggctgatgagtctgggcattccccaccggtgacggtggcccaggctgcgttggcggcctacccatggctaacgccatgggacgctagttgtgaacaaggtgtgaagagcctattgagctacttaagagtcctccggcccctgaatgcggctaatcccaaccacggagcaggcgccaccaatccaggaggtagcctgtcgtaacgcgtaagtctgtggcggaaccgactactttgggtgtccgtgtttccttttatctctttaatggctgcttatggtgacaatcatagattgttatcataaagcgaattggattggccatccggtgaagtgtaaacacattatttatttgttcattggatttactccattcacccgatttactccaaatataatacatattgtattgttgataagacgttgctactaca

SEQ ID NO: 23616 - DNA, 695 bp, synthetic construct
  source 1..695: mol_type = other DNA
gcactccggtattacggtacccttgtgcgcctgtttttatactcccttccccgtaacttagaagcacaaaaccaagttcaatagaagggggtacaaaccagtaccaccacgaacaagcacttctgtttccccggtgacgttgtatagactgctcacgcggttgaaagcgacgaatccgttatccgcttgtgtacttcgagaagcctagtaccaccttggaatcttcgacgcgttgcgctcggcactctaccccagagtgtagcttaggctgatgagtctgggcattcctcatcggcgacgatggcccaggctgcgttggcggcctacctatggctaacgccataggacgctagttgtgaacaaggtgtgaagagcctattgagctacacaagagtcctccggcccctgaatgcggctaatcctaaccatggagcaggagatcacaaaccagtggtattcctgtcgtaatgcgcaagtccgtggcggaaccgactactttgggtgtccgtgtttccttttatttttatcatggctgcttatggtgacaatcattgattgttatcataaagcgaattggattggccatccggtgaaaataagatttattatttacttgtttgttggattcactccgctaaacacattcactccaggtatcatctctatagtgattgaaattaggcaattacatcaca

SEQ ID NO: 23617 - DNA, 645 bp, synthetic construct
  source 1..645: mol_type = other DNA
ccgtaacttagaagcacaaaaccaagttcaatagaagggggtacaaaccagtaccaccacgaacaagcacttctgtttccccggtgacgttgtatagactgctcacgcggttgaaagcgacgaatccgttatccgcttgtgtacttcgagaagcctagtaccaccttggaatcttcgacgcgttgcgctcggcactctaccccagagtgtagcttaggctgatgagtctgggcattcctcatcggcgacgatggcccaggctgcgttggcggcctacctatggctaacgccataggacgctagttgtgaacaaggtgtgaagagcctattgagctacacaagagtcctccggcccctgaatgcggctaatcctaaccatggagcaggagatcacaaaccagtggtattcctgtcgtaatgcgcaagtccgtggcggaaccgactactttgggtgtccgtgtttccttttatttttatcatggctgcttatggtgacaatcattgattgttatcataaagcgaattggattggccatccggtgaaaataagatttattatttacttgtttgttggattcactccgctaaacacattcactccaggtatcatctctatagtgattgaaattaggcaattacatcaca

SEQ ID NO: 23618 - DNA, 595 bp, synthetic construct
  source 1..595: mol_type = other DNA
gtaccaccacgaacaagcacttctgtttccccggtgacgttgtatagactgctcacgcggttgaaagcgacgaatccgttatccgcttgtgtacttcgagaagcctagtaccaccttggaatcttcgacgcgttgcgctcggcactctaccccagagtgtagcttaggctgatgagtctgggcattcctcatcggcgacgatggcccaggctgcgttggcggcctacctatggctaacgccataggacgctagttgtgaacaaggtgtgaagagcctattgagctacacaagagtcctccggcccctgaatgcggctaatcctaaccatggagcaggagatcacaaaccagtggtattcctgtcgtaatgcgcaagtccgtggcggaaccgactactttgggtgtccgtgtttccttttatttttatcatggctgcttatggtgacaatcattgattgttatcataaagcgaattggattggccatccggtgaaaataagatttattatttacttgtttgttggattcactccgctaaacacattcactccaggtatcatctctatagtgattgaaattaggcaattacatcaca

SEQ ID NO: 23619 - DNA, 545 bp, synthetic construct
  source 1..545: mol_type = other DNA
gctcacgcggttgaaagcgacgaatccgttatccgcttgtgtacttcgagaagcctagtaccaccttggaatcttcgacgcgttgcgctcggcactctaccccagagtgtagcttaggctgatgagtctgggcattcctcatcggcgacgatggcccaggctgcgttggcggcctacctatggctaacgccataggacgctagttgtgaacaaggtgtgaagagcctattgagctacacaagagtcctccggcccctgaatgcggctaatcctaaccatggagcaggagatcacaaaccagtggtattcctgtcgtaatgcgcaagtccgtggcggaaccgactactttgggtgtccgtgtttccttttatttttatcatggctgcttatggtgacaatcattgattgttatcataaagcgaattggattggccatccggtgaaaataagatttattatttacttgtttgttggattcactccgctaaacacattcactccaggtatcatctctatagtgattgaaattaggcaattacatcaca

SEQ ID NO: 23620 - DNA, 695 bp, synthetic construct
  source 1..695: mol_type = other DNA
gtactctggtatcacggtacctttgtacgcctgttttacatcccctcccccacgtaactttagaagcaattcaacaagttcaatagagggggtacaaaccagtatcaccacgaacaagcacttctgtttccccggtgattttacataagctgtgcccacggctgaaagtgaatgatccgttacccgctcgagtacttcgaaaagcctagtatcgctttgggatcttcgacgcgttgcgctcagcactctaccccgagtgtagcttaggctgatgagtctgggcattccccatcggcgacgatggcccaggctgcgttggcggcctacccatggctaacgccatgggacgctagttgtgaacaaggtgtgaagagcctattgagctactcgagagtcctccggcccctgaatgcggctaatcccaaccacggatcaggtgcctccaacccaggaggtggcctgtcgtaacgcgcaagtctgtggcggaaccgactactttgggtgtccgtgtttccttttatcttttaaatggctgcttatggtgacaatcatagattgttatcataaagcgaattggattggccatccggtgaaatacaaacacattatttacttgtttgttggatttactccgctcacacagcttactcctaagataatatttattgtattgctggtaaggagacactattata

SEQ ID NO: 23621 - DNA, 645 bp, synthetic construct
  source 1..645: mol_type = other DNA
cacgtaactttagaagcaattcaacaagttcaatagagggggtacaaaccagtatcaccacgaacaagcacttctgtttccccggtgattttacataagctgtgcccacggctgaaagtgaatgatccgttacccgctcgagtacttcgaaaagcctagtatcgctttgggatcttcgacgcgttgcgctcagcactctaccccgagtgtagcttaggctgatgagtctgggcattccccatcggcgacgatggcccaggctgcgttggcggcctacccatggctaacgccatgggacgctagttgtgaacaaggtgtgaagagcctattgagctactcgagagtcctccggcccctgaatgcggctaatcccaaccacggatcaggtgcctccaacccaggaggtggcctgtcgtaacgcgcaagtctgtggcggaaccgactactttgggtgtccgtgtttccttttatcttttaaatggctgcttatggtgacaatcatagattgttatcataaagcgaattggattggccatccggtgaaatacaaacacattatttacttgtttgttggatttactccgctcacacagcttactcctaagataatatttattgtattgctggtaaggagacactattata

SEQ ID NO: 23622 - DNA, 595 bp, synthetic construct
  source 1..595: mol_type = other DNA
agtatcaccacgaacaagcacttctgtttccccggtgattttacataagctgtgcccacggctgaaagtgaatgatccgttacccgctcgagtacttcgaaaagcctagtatcgctttgggatcttcgacgcgttgcgctcagcactctaccccgagtgtagcttaggctgatgagtctgggcattccccatcggcgacgatggcccaggctgcgttggcggcctacccatggctaacgccatgggacgctagttgtgaacaaggtgtgaagagcctattgagctactcgagagtcctccggcccctgaatgcggctaatcccaaccacggatcaggtgcctccaacccaggaggtggcctgtcgtaacgcgcaagtctgtggcggaaccgactactttgggtgtccgtgtttccttttatcttttaaatggctgcttatggtgacaatcatagattgttatcataaagcgaattggattggccatccggtgaaatacaaacacattatttacttgtttgttggatttactccgctcacacagcttactcctaagataatatttattgtattgctggtaaggagacactattata

SEQ ID NO: 23623 - DNA, 545 bp, synthetic construct
  source 1..545: mol_type = other DNA
tgtgcccacggctgaaagtgaatgatccgttacccgctcgagtacttcgaaaagcctagtatcgctttgggatcttcgacgcgttgcgctcagcactctaccccgagtgtagcttaggctgatgagtctgggcattccccatcggcgacgatggcccaggctgcgttggcggcctacccatggctaacgccatgggacgctagttgtgaacaaggtgtgaagagcctattgagctactcgagagtcctccggcccctgaatgcggctaatcccaaccacggatcaggtgcctccaacccaggaggtggcctgtcgtaacgcgcaagtctgtggcggaaccgactactttgggtgtccgtgtttccttttatcttttaaatggctgcttatggtgacaatcatagattgttatcataaagcgaattggattggccatccggtgaaatacaaacacattatttacttgtttgttggatttactccgctcacacagcttactcctaagataatatttattgtattgctggtaaggagacactattata

SEQ ID NO: 23624 - DNA, 695 bp, synthetic construct
  source 1..695: mol_type = other DNA
gcactctggtattgcggtaccttagtgcgcctgttttatatacccatcccccaaacgtgatttagatgcatgttaacgaagaccaatagtaagcgcagcacaccagctgtgttccggtcaagcacttctgttaccccggactgagtatcaataagctactcacgtggctgaaggagaaaacgttcgttacccggccaattacttcgagaaacccagtaacaccatgaaggttgcgcagtgtttcgctccgcacaaccccagtgtagatcaggtcgatgagtcaccgcattccccacgggtgaccgtggcggtggctgcactggcggcctgcccatggggtaacccatgggacgcttcaatactgacatggtgcgaagagtctattgagctaattggtagtcctccggcccctgaatgcggctaatcctaactgcggagcagatacccacacgccagtgggcagtctgtcgtaacgggcaactctgcagcggaaccgactactttgggtgtccgtgtttctctttatccttatactggctgcttatggtgacaattgggagattgttaccatatagctattggattggccatccagtgacaaatagagcaatcgtgtatttgtttgttggtttcgtaccattaaattacaaggtcataaacaccctcaatcttattatagcattcaatacaacaaa

SEQ ID NO: 23625 - DNA, 645 bp, synthetic construct
  source 1..645: mol_type = other DNA
ccaaacgtgatttagatgcatgttaacgaagaccaatagtaagcgcagcacaccagctgtgttccggtcaagcacttctgttaccccggactgagtatcaataagctactcacgtggctgaaggagaaaacgttcgttacccggccaattacttcgagaaacccagtaacaccatgaaggttgcgcagtgtttcgctccgcacaaccccagtgtagatcaggtcgatgagtcaccgcattccccacgggtgaccgtggcggtggctgcactggcggcctgcccatggggtaacccatgggacgcttcaatactgacatggtgcgaagagtctattgagctaattggtagtcctccggcccctgaatgcggctaatcctaactgcggagcagatacccacacgccagtgggcagtctgtcgtaacgggcaactctgcagcggaaccgactactttgggtgtccgtgtttctctttatccttatactggctgcttatggtgacaattgggagattgttaccatatagctattggattggccatccagtgacaaatagagcaatcgtgtatttgtttgttggtttcgtaccattaaattacaaggtcataaacaccctcaatcttattatagcattcaatacaacaaa

SEQ ID NO: 23626 - DNA, 595 bp, synthetic construct
  source 1..595: mol_type = other DNA
caccagctgtgttccggtcaagcacttctgttaccccggactgagtatcaataagctactcacgtggctgaaggagaaaacgttcgttacccggccaattacttcgagaaacccagtaacaccatgaaggttgcgcagtgtttcgctccgcacaaccccagtgtagatcaggtcgatgagtcaccgcattccccacgggtgaccgtggcggtggctgcactggcggcctgcccatggggtaacccatgggacgcttcaatactgacatggtgcgaagagtctattgagctaattggtagtcctccggcccctgaatgcggctaatcctaactgcggagcagatacccacacgccagtgggcagtctgtcgtaacgggcaactctgcagcggaaccgactactttgggtgtccgtgtttctctttatccttatactggctgcttatggtgacaattgggagattgttaccatatagctattggattggccatccagtgacaaatagagcaatcgtgtatttgtttgttggtttcgtaccattaaattacaaggtcataaacaccctcaatcttattatagcattcaatacaacaaa

SEQ ID NO: 23627 - DNA, 545 bp, synthetic construct
  source 1..545: mol_type = other DNA
ataagctactcacgtggctgaaggagaaaacgttcgttacccggccaattacttcgagaaacccagtaacaccatgaaggttgcgcagtgtttcgctccgcacaaccccagtgtagatcaggtcgatgagtcaccgcattccccacgggtgaccgtggcggtggctgcactggcggcctgcccatggggtaacccatgggacgcttcaatactgacatggtgcgaagagtctattgagctaattggtagtcctccggcccctgaatgcggctaatcctaactgcggagcagatacccacacgccagtgggcagtctgtcgtaacgggcaactctgcagcggaaccgactactttgggtgtccgtgtttctctttatccttatactggctgcttatggtgacaattgggagattgttaccatatagctattggattggccatccagtgacaaatagagcaatcgtgtatttgtttgttggtttcgtaccattaaattacaaggtcataaacaccctcaatcttattatagcattcaatacaacaaa

SEQ ID NO: 23628 - DNA, 695 bp, synthetic construct
  source 1..695: mol_type = other DNA
gcacactggtatcacggtacctttgtgcgcctgttttatccaccctttccccgaacgaaacttagaagtttgaattaaacggtcaataggaaacccagtacaccaactgggctgtgaccaagcacttctgtgaccccggaccgagtatcaataagctactcacgtggctgaaggagaaaacgttcgttacccggccaattacttcgagaaacttagtaccaccatgaaagttgcgcagcgtttcgctccgcacgaccccagtgtagatcaggctgatgagtcaccgcgtaccccacgggtgaccgtggcggtggctgcgttggcggcctgcccttggggcaacccaagggacgcttcaatactgacatggtgcgaagagtctattgagctaattggtagtcctccggcccctgaatgcggctaatcccaactgcggagcagatacccacataccagtgggcagtctgtcgtaatgggcaactctgcagcggaaccgactactttgggtgtccgtgtttcctttatttcttacactggctgcttatggtgacaattgagagattgttgccatatagctattggattggccatccggtgtctaatagagcaattatctacctttttgttggatttattccacttaactataaagcactcaaaacacttatatacattgtagatctcaacacagcaaa

SEQ ID NO: 23629 - DNA, 645 bp, synthetic construct
  source 1..645: mol_type = other DNA
ccgaacgaaacttagaagtttgaattaaacggtcaataggaaacccagtacaccaactgggctgtgaccaagcacttctgtgaccccggaccgagtatcaataagctactcacgtggctgaaggagaaaacgttcgttacccggccaattacttcgagaaacttagtaccaccatgaaagttgcgcagcgtttcgctccgcacgaccccagtgtagatcaggctgatgagtcaccgcgtaccccacgggtgaccgtggcggtggctgcgttggcggcctgcccttggggcaacccaagggacgcttcaatactgacatggtgcgaagagtctattgagctaattggtagtcctccggcccctgaatgcggctaatcccaactgcggagcagatacccacataccagtgggcagtctgtcgtaatgggcaactctgcagcggaaccgactactttgggtgtccgtgtttcctttatttcttacactggctgcttatggtgacaattgagagattgttgccatatagctattggattggccatccggtgtctaatagagcaattatctacctttttgttggatttattccacttaactataaagcactcaaaacacttatatacattgtagatctcaacacagcaaa

SEQ ID NO: 23630 - DNA, 595 bp, synthetic construct
  source 1..595: mol_type = other DNA
caccaactgggctgtgaccaagcacttctgtgaccccggaccgagtatcaataagctactcacgtggctgaaggagaaaacgttcgttacccggccaattacttcgagaaacttagtaccaccatgaaagttgcgcagcgtttcgctccgcacgaccccagtgtagatcaggctgatgagtcaccgcgtaccccacgggtgaccgtggcggtggctgcgttggcggcctgcccttggggcaacccaagggacgcttcaatactgacatggtgcgaagagtctattgagctaattggtagtcctccggcccctgaatgcggctaatcccaactgcggagcagatacccacataccagtgggcagtctgtcgtaatgggcaactctgcagcggaaccgactactttgggtgtccgtgtttcctttatttcttacactggctgcttatggtgacaattgagagattgttgccatatagctattggattggccatccggtgtctaatagagcaattatctacctttttgttggatttattccacttaactataaagcactcaaaacacttatatacattgtagatctcaacacagcaaa

SEQ ID NO: 23631 - DNA, 545 bp, synthetic construct
  source 1..545: mol_type = other DNA
ataagctactcacgtggctgaaggagaaaacgttcgttacccggccaattacttcgagaaacttagtaccaccatgaaagttgcgcagcgtttcgctccgcacgaccccagtgtagatcaggctgatgagtcaccgcgtaccccacgggtgaccgtggcggtggctgcgttggcggcctgcccttggggcaacccaagggacgcttcaatactgacatggtgcgaagagtctattgagctaattggtagtcctccggcccctgaatgcggctaatcccaactgcggagcagatacccacataccagtgggcagtctgtcgtaatgggcaactctgcagcggaaccgactactttgggtgtccgtgtttcctttatttcttacactggctgcttatggtgacaattgagagattgttgccatatagctattggattggccatccggtgtctaatagagcaattatctacctttttgttggatttattccacttaactataaagcactcaaaacacttatatacattgtagatctcaacacagcaaa

SEQ ID NO: 23632 - DNA, 695 bp, synthetic construct
  source 1..695: mol_type = other DNA
gcacactggtatcacggtacctttgtgcgcctgttttatacacccccccctacatcgtaatttagaagtccaagccaaacggtcaatagacaacccagtatgccaactgggtcccgaccaagcacttctgttgccccggaccgagtatcaataagctgcttgcgcggctgaaggagaaagcgttcgttacccggccaattacttcgagaaacccagtaacaccatggaagttgcgtggcgtttcgctccgcacaaccccagtgtagatcaggtcgatgagtcaccgcaaccctcacgggcgaccgtggcggtggctgcgttggcggcctgcccatgggacaacccatgggacgcttcaataccgacatggtgcgaagagtctattgagctaattggtattcctccggcccctgaatgcggctaatcctaactgcggagcagacacccacatgccagtgggcagtctgtcgtaacgggaaactctgcagcggaaccgactactttgggtgaccgtgtttcctattatccttattctggctgcttatggtgacaattgaaagattgttaccatatagctattggattggccatccggtgtctaatagagctattatatacctctttgttggatttataccacttaacaaagtaaactaccagactctgtgctatatcattggattgaacacggtgaa

SEQ ID NO: 23633 - DNA, 645 bp, synthetic construct
  source 1..645: mol_type = other DNA
tacatcgtaatttagaagtccaagccaaacggtcaatagacaacccagtatgccaactgggtcccgaccaagcacttctgttgccccggaccgagtatcaataagctgcttgcgcggctgaaggagaaagcgttcgttacccggccaattacttcgagaaacccagtaacaccatggaagttgcgtggcgtttcgctccgcacaaccccagtgtagatcaggtcgatgagtcaccgcaaccctcacgggcgaccgtggcggtggctgcgttggcggcctgcccatgggacaacccatgggacgcttcaataccgacatggtgcgaagagtctattgagctaattggtattcctccggcccctgaatgcggctaatcctaactgcggagcagacacccacatgccagtgggcagtctgtcgtaacgggaaactctgcagcggaaccgactactttgggtgaccgtgtttcctattatccttattctggctgcttatggtgacaattgaaagattgttaccatatagctattggattggccatccggtgtctaatagagctattatatacctctttgttggatttataccacttaacaaagtaaactaccagactctgtgctatatcattggattgaacacggtgaa

SEQ ID NO: 23634 - DNA, 595 bp, synthetic construct
  source 1..595: mol_type = other DNA
tgccaactgggtcccgaccaagcacttctgttgccccggaccgagtatcaataagctgcttgcgcggctgaaggagaaagcgttcgttacccggccaattacttcgagaaacccagtaacaccatggaagttgcgtggcgtttcgctccgcacaaccccagtgtagatcaggtcgatgagtcaccgcaaccctcacgggcgaccgtggcggtggctgcgttggcggcctgcccatgggacaacccatgggacgcttcaataccgacatggtgcgaagagtctattgagctaattggtattcctccggcccctgaatgcggctaatcctaactgcggagcagacacccacatgccagtgggcagtctgtcgtaacgggaaactctgcagcggaaccgactactttgggtgaccgtgtttcctattatccttattctggctgcttatggtgacaattgaaagattgttaccatatagctattggattggccatccggtgtctaatagagctattatatacctctttgttggatttataccacttaacaaagtaaactaccagactctgtgctatatcattggattgaacacggtgaa

SEQ ID NO: 23635 - DNA, 545 bp, synthetic construct
  source 1..545: mol_type = other DNA
ataagctgcttgcgcggctgaaggagaaagcgttcgttacccggccaattacttcgagaaacccagtaacaccatggaagttgcgtggcgtttcgctccgcacaaccccagtgtagatcaggtcgatgagtcaccgcaaccctcacgggcgaccgtggcggtggctgcgttggcggcctgcccatgggacaacccatgggacgcttcaataccgacatggtgcgaagagtctattgagctaattggtattcctccggcccctgaatgcggctaatcctaactgcggagcagacacccacatgccagtgggcagtctgtcgtaacgggaaactctgcagcggaaccgactactttgggtgaccgtgtttcctattatccttattctggctgcttatggtgacaattgaaagattgttaccatatagctattggattggccatccggtgtctaatagagctattatatacctctttgttggatttataccacttaacaaagtaaactaccagactctgtgctatatcattggattgaacacggtgaa

SEQ ID NO: 23636 - DNA, 695 bp, synthetic construct
  source 1..695: mol_type = other DNA
agcacactggtattacggtacctttgtgcgcctgttttatccaccccctccccaatgtaacgtagaagcacaaaccaagtggtcaatagatggctcagtacaccaactgggcttagaccaagcacttctgttaccccggactgagtatcaataggctgctcacgcggctgaaggagaaaacgttcgttacccgaccaactacttcgagaagcctagtaccatcatgaaggatgcgcagtgtttcgttcagcacaaccccagtgtagatcaggccgatgagtcaccgcaatccccacgggtgaccgtggcggtggctgcgctggcggcctgcccatggggcaacctatgggacgcttcaatttcgacatggtgcgaagagcctattgagctagttggtagtcctccggcccctgaatgcggctaatcccaactgcggagcagacacccacaaaccagtgggcagtttgtcgtaacgggcaactctgcagcggaaccgactactttgggtgtccgtgtttccttttatctatatattggctgcttatggtgacaattgagggattgttgccatatagctattggattggccatccggtaacaaacagagctattatttacctttttgttggcttcgtgccgttgaactttaaagttattaaaaccatatacttcatcttgacactcaacacagcaaa

SEQ ID NO: 23637 - DNA, 645 bp, synthetic construct
  source 1..645: mol_type = other DNA
cccaatgtaacgtagaagcacaaaccaagtggtcaatagatggctcagtacaccaactgggcttagaccaagcacttctgttaccccggactgagtatcaataggctgctcacgcggctgaaggagaaaacgttcgttacccgaccaactacttcgagaagcctagtaccatcatgaaggatgcgcagtgtttcgttcagcacaaccccagtgtagatcaggccgatgagtcaccgcaatccccacgggtgaccgtggcggtggctgcgctggcggcctgcccatggggcaacctatgggacgcttcaatttcgacatggtgcgaagagcctattgagctagttggtagtcctccggcccctgaatgcggctaatcccaactgcggagcagacacccacaaaccagtgggcagtttgtcgtaacgggcaactctgcagcggaaccgactactttgggtgtccgtgtttccttttatctatatattggctgcttatggtgacaattgagggattgttgccatatagctattggattggccatccggtaacaaacagagctattatttacctttttgttggcttcgtgccgttgaactttaaagttattaaaaccatatacttcatcttgacactcaacacagcaaa

SEQ ID NO: 23638 - DNA, 595 bp, synthetic construct
  source 1..595: mol_type = other DNA
caccaactgggcttagaccaagcacttctgttaccccggactgagtatcaataggctgctcacgcggctgaaggagaaaacgttcgttacccgaccaactacttcgagaagcctagtaccatcatgaaggatgcgcagtgtttcgttcagcacaaccccagtgtagatcaggccgatgagtcaccgcaatccccacgggtgaccgtggcggtggctgcgctggcggcctgcccatggggcaacctatgggacgcttcaatttcgacatggtgcgaagagcctattgagctagttggtagtcctccggcccctgaatgcggctaatcccaactgcggagcagacacccacaaaccagtgggcagtttgtcgtaacgggcaactctgcagcggaaccgactactttgggtgtccgtgtttccttttatctatatattggctgcttatggtgacaattgagggattgttgccatatagctattggattggccatccggtaacaaacagagctattatttacctttttgttggcttcgtgccgttgaactttaaagttattaaaaccatatacttcatcttgacactcaacacagcaaa

SEQ ID NO: 23639 - DNA, 545 bp, synthetic construct
  source 1..545: mol_type = other DNA
ataggctgctcacgcggctgaaggagaaaacgttcgttacccgaccaactacttcgagaagcctagtaccatcatgaaggatgcgcagtgtttcgttcagcacaaccccagtgtagatcaggccgatgagtcaccgcaatccccacgggtgaccgtggcggtggctgcgctggcggcctgcccatggggcaacctatgggacgcttcaatttcgacatggtgcgaagagcctattgagctagttggtagtcctccggcccctgaatgcggctaatcccaactgcggagcagacacccacaaaccagtgggcagtttgtcgtaacgggcaactctgcagcggaaccgactactttgggtgtccgtgtttccttttatctatatattggctgcttatggtgacaattgagggattgttgccatatagctattggattggccatccggtaacaaacagagctattatttacctttttgttggcttcgtgccgttgaactttaaagttattaaaaccatatacttcatcttgacactcaacacagcaaa

SEQ ID NO: 23640 - DNA, 695 bp, synthetic construct
  source 1..695: mol_type = other DNA
agcacactggtattgcggtacccttgtgcgcctgttttatccaccctccccaaccgtaatttagaagcacgaacaacgtggtcaacaggcaacccagtataccaactgggtctcgaccaagcacttctgtcaccccggactgagtatcaataagctgctcgcgtggctgaaggagaaaacgttcgttacccggccaattacttcgagaaacctagtatcaccatggaagttgcgcagtgtttcgctccgcacaaccccagtgtagatcaggtcgatgagtcaccgcaaccctcacgggtgaccgtggcggtggctgcgctggcggcctgcccatggggcaacccatgggacgcttcaatactgacatggtgcgaagagtctattgagctaattggtaatcctccggcccctgaatgcggctaatcctaactgcggagcagatatccacacaccagtggacagtctgtcgtaatgggcaactctgcagcggaaccgactactttgggtgtccgtgtttccttttattctttttattggctgcttatggtgacaattgagagattgttaccatatagctattggattggccatccggtgagcaacaggtcaattgtattcctctttgttggatttgtgccattaaactataataactacaacaccctgctttacattatccatttaaacacacagaa

SEQ ID NO: 23641 - DNA, 645 bp, synthetic construct
  source 1..645: mol_type = other DNA
caaccgtaatttagaagcacgaacaacgtggtcaacaggcaacccagtataccaactgggtctcgaccaagcacttctgtcaccccggactgagtatcaataagctgctcgcgtggctgaaggagaaaacgttcgttacccggccaattacttcgagaaacctagtatcaccatggaagttgcgcagtgtttcgctccgcacaaccccagtgtagatcaggtcgatgagtcaccgcaaccctcacgggtgaccgtggcggtggctgcgctggcggcctgcccatggggcaacccatgggacgcttcaatactgacatggtgcgaagagtctattgagctaattggtaatcctccggcccctgaatgcggctaatcctaactgcggagcagatatccacacaccagtggacagtctgtcgtaatgggcaactctgcagcggaaccgactactttgggtgtccgtgtttccttttattctttttattggctgcttatggtgacaattgagagattgttaccatatagctattggattggccatccggtgagcaacaggtcaattgtattcctctttgttggatttgtgccattaaactataataactacaacaccctgctttacattatccatttaaacacacagaa

SEQ ID NO: 23642 - DNA, 595 bp, synthetic construct
  source 1..595: mol_type = other DNA
accaactgggtctcgaccaagcacttctgtcaccccggactgagtatcaataagctgctcgcgtggctgaaggagaaaacgttcgttacccggccaattacttcgagaaacctagtatcaccatggaagttgcgcagtgtttcgctccgcacaaccccagtgtagatcaggtcgatgagtcaccgcaaccctcacgggtgaccgtggcggtggctgcgctggcggcctgcccatggggcaacccatgggacgcttcaatactgacatggtgcgaagagtctattgagctaattggtaatcctccggcccctgaatgcggctaatcctaactgcggagcagatatccacacaccagtggacagtctgtcgtaatgggcaactctgcagcggaaccgactactttgggtgtccgtgtttccttttattctttttattggctgcttatggtgacaattgagagattgttaccatatagctattggattggccatccggtgagcaacaggtcaattgtattcctctttgttggatttgtgccattaaactataataactacaacaccctgctttacattatccatttaaacacacagaa

SEQ ID NO: 23643 - DNA, 545 bp, synthetic construct
  source 1..545: mol_type = other DNA
taagctgctcgcgtggctgaaggagaaaacgttcgttacccggccaattacttcgagaaacctagtatcaccatggaagttgcgcagtgtttcgctccgcacaaccccagtgtagatcaggtcgatgagtcaccgcaaccctcacgggtgaccgtggcggtggctgcgctggcggcctgcccatggggcaacccatgggacgcttcaatactgacatggtgcgaagagtctattgagctaattggtaatcctccggcccctgaatgcggctaatcctaactgcggagcagatatccacacaccagtggacagtctgtcgtaatgggcaactctgcagcggaaccgactactttgggtgtccgtgtttccttttattctttttattggctgcttatggtgacaattgagagattgttaccatatagctattggattggccatccggtgagcaacaggtcaattgtattcctctttgttggatttgtgccattaaactataataactacaacaccctgctttacattatccatttaaacacacagaa

SEQ ID NO: 23644 - DNA, 695 bp, synthetic construct
  source 1..695: mol_type = other DNA
ggtatcacggtacccttgtacgcctgttttatactccctttcccccgcaacttagaagattatgagaatccacgttcaacaggaagggggtacaaaccagtaccaccacgaacaagcacttctgtttccccggtgaggttgtatagactgtacccacggttgaagacgactgatccgttacccgctctagtacttcgagaagcttagtaacaccttggaatcatcgatgcgttgcgttcaacactcaaccccagagtgtagcttaggctgatgagtctggacaatcctcaccggtgacggtggtccaggctgcgctggcggcctacctgtggtccaaaaccacaggacgctagatgtgaacaaggtgcgaagagcctattgagctactagagagtcctccggcccctgaatgcggctaatcccaaccacgaagcaagtgctcacgatccagtgagtggcttgtcgtaacgcgtaagttcgtggcggaaccgactactttgggtgtccgtgtttcctttttaactttatatggctgcttatggtgacaatcattgattgttatcataaagcgatttggattggccatccagtgagagcgagaacaactacttatttgctcgttggatttgctccttcgacaagctacattttagatatcattctcattgtattcttgatcagaaagcaatatcata

SEQ ID NO: 23645 - DNA, 645 bp, synthetic construct
  source 1..645: mol_type = other DNA
cttagaagattatgagaatccacgttcaacaggaagggggtacaaaccagtaccaccacgaacaagcacttctgtttccccggtgaggttgtatagactgtacccacggttgaagacgactgatccgttacccgctctagtacttcgagaagcttagtaacaccttggaatcatcgatgcgttgcgttcaacactcaaccccagagtgtagcttaggctgatgagtctggacaatcctcaccggtgacggtggtccaggctgcgctggcggcctacctgtggtccaaaaccacaggacgctagatgtgaacaaggtgcgaagagcctattgagctactagagagtcctccggcccctgaatgcggctaatcccaaccacgaagcaagtgctcacgatccagtgagtggcttgtcgtaacgcgtaagttcgtggcggaaccgactactttgggtgtccgtgtttcctttttaactttatatggctgcttatggtgacaatcattgattgttatcataaagcgatttggattggccatccagtgagagcgagaacaactacttatttgctcgttggatttgctccttcgacaagctacattttagatatcattctcattgtattcttgatcagaaagcaatatcata

SEQ ID NO: 23646 - DNA, 595 bp, synthetic construct
  source 1..595: mol_type = other DNA
taccaccacgaacaagcacttctgtttccccggtgaggttgtatagactgtacccacggttgaagacgactgatccgttacccgctctagtacttcgagaagcttagtaacaccttggaatcatcgatgcgttgcgttcaacactcaaccccagagtgtagcttaggctgatgagtctggacaatcctcaccggtgacggtggtccaggctgcgctggcggcctacctgtggtccaaaaccacaggacgctagatgtgaacaaggtgcgaagagcctattgagctactagagagtcctccggcccctgaatgcggctaatcccaaccacgaagcaagtgctcacgatccagtgagtggcttgtcgtaacgcgtaagttcgtggcggaaccgactactttgggtgtccgtgtttcctttttaactttatatggctgcttatggtgacaatcattgattgttatcataaagcgatttggattggccatccagtgagagcgagaacaactacttatttgctcgttggatttgctccttcgacaagctacattttagatatcattctcattgtattcttgatcagaaagcaatatcata

SEQ ID NO: 23647 - DNA, 545 bp, synthetic construct
  source 1..545: mol_type = other DNA
tacccacggttgaagacgactgatccgttacccgctctagtacttcgagaagcttagtaacaccttggaatcatcgatgcgttgcgttcaacactcaaccccagagtgtagcttaggctgatgagtctggacaatcctcaccggtgacggtggtccaggctgcgctggcggcctacctgtggtccaaaaccacaggacgctagatgtgaacaaggtgcgaagagcctattgagctactagagagtcctccggcccctgaatgcggctaatcccaaccacgaagcaagtgctcacgatccagtgagtggcttgtcgtaacgcgtaagttcgtggcggaaccgactactttgggtgtccgtgtttcctttttaactttatatggctgcttatggtgacaatcattgattgttatcataaagcgatttggattggccatccagtgagagcgagaacaactacttatttgctcgttggatttgctccttcgacaagctacattttagatatcattctcattgtattcttgatcagaaagcaatatcata

SEQ ID NO: 23648 - DNA, 696 bp, synthetic construct
  source 1..696: mol_type = other DNA
gcactctgattccacggaatccttgtgcgcctgttttatatcccctccccaagttgcaacttagaagcattgcactacaatgatcagtagcaggcgtggcgctccagccatgtctcgatcaagcacttctgtttccccggaccgagtatcaatagactgctaacgcggttgaaggagaaaacgttcgttatccggctaactacttcgagaaacctagtagcaccatcgaagctgcggggcgtttcgctcagcacttcccccgtgtagatcaggtcgatgagtcactgcaatcctcacgggcgaccgtggcagtggctgcgttggcggcctgcctatggggcaacccataggacgcttcaaagtggacatggtgtgaagagtctattgagctagttagtagtcctccggcccctgaatgcggctaatcctaactgcggagcacataccttcaatccaggaggtagtgtgtcgtaacgggcaactctgcagcggaaccgactactttgggtgtccgtgtttccttttattctcttattggctgcttatggtgacaattgaagaattgttaccatatagctattggattggccatccagtgtctaacagagcaattgtgtacttatttgttggttttgttcctttgtctcacacgtcccttagtactttgtattacattataaaactgaattcggagag

SEQ ID NO: 23649 - DNA, 646 bp, synthetic construct
  source 1..646: mol_type = other DNA
aagttgcaacttagaagcattgcactacaatgatcagtagcaggcgtggcgctccagccatgtctcgatcaagcacttctgtttccccggaccgagtatcaatagactgctaacgcggttgaaggagaaaacgttcgttatccggctaactacttcgagaaacctagtagcaccatcgaagctgcggggcgtttcgctcagcacttcccccgtgtagatcaggtcgatgagtcactgcaatcctcacgggcgaccgtggcagtggctgcgttggcggcctgcctatggggcaacccataggacgcttcaaagtggacatggtgtgaagagtctattgagctagttagtagtcctccggcccctgaatgcggctaatcctaactgcggagcacataccttcaatccaggaggtagtgtgtcgtaacgggcaactctgcagcggaaccgactactttgggtgtccgtgtttccttttattctcttattggctgcttatggtgacaattgaagaattgttaccatatagctattggattggccatccagtgtctaacagagcaattgtgtacttatttgttggttttgttcctttgtctcacacgtcccttagtactttgtattacattataaaactgaattcggagag

SEQ ID NO: 23650 - DNA, 596 bp, synthetic construct
  source 1..596: mol_type = other DNA
gctccagccatgtctcgatcaagcacttctgtttccccggaccgagtatcaatagactgctaacgcggttgaaggagaaaacgttcgttatccggctaactacttcgagaaacctagtagcaccatcgaagctgcggggcgtttcgctcagcacttcccccgtgtagatcaggtcgatgagtcactgcaatcctcacgggcgaccgtggcagtggctgcgttggcggcctgcctatggggcaacccataggacgcttcaaagtggacatggtgtgaagagtctattgagctagttagtagtcctccggcccctgaatgcggctaatcctaactgcggagcacataccttcaatccaggaggtagtgtgtcgtaacgggcaactctgcagcggaaccgactactttgggtgtccgtgtttccttttattctcttattggctgcttatggtgacaattgaagaattgttaccatatagctattggattggccatccagtgtctaacagagcaattgtgtacttatttgttggttttgttcctttgtctcacacgtcccttagtactttgtattacattataaaactgaattcggagag

SEQ ID NO: 23651 - DNA, 546 bp, synthetic construct
  source 1..546: mol_type = other DNA
aatagactgctaacgcggttgaaggagaaaacgttcgttatccggctaactacttcgagaaacctagtagcaccatcgaagctgcggggcgtttcgctcagcacttcccccgtgtagatcaggtcgatgagtcactgcaatcctcacgggcgaccgtggcagtggctgcgttggcggcctgcctatggggcaacccataggacgcttcaaagtggacatggtgtgaagagtctattgagctagttagtagtcctccggcccctgaatgcggctaatcctaactgcggagcacataccttcaatccaggaggtagtgtgtcgtaacgggcaactctgcagcggaaccgactactttgggtgtccgtgtttccttttattctcttattggctgcttatggtgacaattgaagaattgttaccatatagctattggattggccatccagtgtctaacagagcaattgtgtacttatttgttggttttgttcctttgtctcacacgtcccttagtactttgtattacattataaaactgaattcggagag

SEQ ID NO: 23652 - DNA, 696 bp, synthetic construct
  source 1..696: mol_type = other DNA
caagcactctggtacctcggtacctttgtgcgcctgttttacaccccccccctagtgaaacttagaagcagcaaaccacgatcaatagcaggcataacgctccagttatgtcttgatcaagcacttctgtttccccggactgagtatcaatagactgctcgcgcggttgaaggagaaaacgttcgttatccggctaactacttcggaaaacctagtaacaccatgaaagttgcggagagcttcgttcagcactcccccagtgtagatcaggtcgatgagtcaccgcattccccacgggcgaccgtggcggtggctgcgttggcggcctgcccatggggtaacccatggggcgctctaatacggacatggtgtgaagagtctactgagctagttagtagtcctccggcccctgaatgcggctaatcccaactgcggagcacacgcccacaagccagcgggtagtgtgtcgtaacgggtaactctgcagcggaaccgactactttgggtgtccgtgtttccttttatctttatattggctgcttatggtgacaattaaagaattgttaccatatagctattggattggccatccggtgtgtaatagagcaattatttacctatttattggttttgtaccattaaccttgaattctgtgaccacccttaattatattttgacccttaacacagctaaac

SEQ ID NO: 23653 - DNA, 646 bp, synthetic construct
  source 1..646: mol_type = other DNA
cctagtgaaacttagaagcagcaaaccacgatcaatagcaggcataacgctccagttatgtcttgatcaagcacttctgtttccccggactgagtatcaatagactgctcgcgcggttgaaggagaaaacgttcgttatccggctaactacttcggaaaacctagtaacaccatgaaagttgcggagagcttcgttcagcactcccccagtgtagatcaggtcgatgagtcaccgcattccccacgggcgaccgtggcggtggctgcgttggcggcctgcccatggggtaacccatggggcgctctaatacggacatggtgtgaagagtctactgagctagttagtagtcctccggcccctgaatgcggctaatcccaactgcggagcacacgcccacaagccagcgggtagtgtgtcgtaacgggtaactctgcagcggaaccgactactttgggtgtccgtgtttccttttatctttatattggctgcttatggtgacaattaaagaattgttaccatatagctattggattggccatccggtgtgtaatagagcaattatttacctatttattggttttgtaccattaaccttgaattctgtgaccacccttaattatattttgacccttaacacagctaaac

SEQ ID NO: 23654 - DNA, 596 bp, synthetic construct
  source 1..596: mol_type = other DNA
tccagttatgtcttgatcaagcacttctgtttccccggactgagtatcaatagactgctcgcgcggttgaaggagaaaacgttcgttatccggctaactacttcggaaaacctagtaacaccatgaaagttgcggagagcttcgttcagcactcccccagtgtagatcaggtcgatgagtcaccgcattccccacgggcgaccgtggcggtggctgcgttggcggcctgcccatggggtaacccatggggcgctctaatacggacatggtgtgaagagtctactgagctagttagtagtcctccggcccctgaatgcggctaatcccaactgcggagcacacgcccacaagccagcgggtagtgtgtcgtaacgggtaactctgcagcggaaccgactactttgggtgtccgtgtttccttttatctttatattggctgcttatggtgacaattaaagaattgttaccatatagctattggattggccatccggtgtgtaatagagcaattatttacctatttattggttttgtaccattaaccttgaattctgtgaccacccttaattatattttgacccttaacacagctaaac

SEQ ID NO: 23655 - DNA, 696 bp, synthetic construct
  source 1..696: mol_type = other DNA
cactctggttccacggaacctttgtgcgcctgttttatacccctccccaacttgtaacgtagaagcagtacctaatatcgatcaatagtaggtgtggcgcaccagccatatcttgatcaagcacttctgtctccccggaccgagtatcaatagactgctcacgcggttgaaggagaaagcgttcgttacccggctaactacttcgagaaacctagtagcaccatggaagctgcggagtgtttcgctcagcacttcccccgtgtagatcaggtcgatgagtcactgcaatcctcacgggtgaccgtggcagtggctgcgttggcggcctgcctgtggggcaacccacaggacgctctaatgtggacatggtgcgaagagtctattgagctagttagtagtcctccggcccctgaatgcggctaatcctaactgcggagcgcatgccctcaatccagagggtagtgcgtcgtaacgggcaactctgcagcggaaccgactactttgggtgtccgtgtttccttttactcttatattggctgcttatggtgacaattacggaattgttaccatatagctattggattggccatccggtgtgcaatagagctatcatttacctatttgttggatttgtaccactgtcattaaagtccataaccacactcaattatatactcactctcaatataactaaac

SEQ ID NO: 23656 - DNA, 646 bp, synthetic construct
  source 1..646: mol_type = other DNA
cttgtaacgtagaagcagtacctaatatcgatcaatagtaggtgtggcgcaccagccatatcttgatcaagcacttctgtctccccggaccgagtatcaatagactgctcacgcggttgaaggagaaagcgttcgttacccggctaactacttcgagaaacctagtagcaccatggaagctgcggagtgtttcgctcagcacttcccccgtgtagatcaggtcgatgagtcactgcaatcctcacgggtgaccgtggcagtggctgcgttggcggcctgcctgtggggcaacccacaggacgctctaatgtggacatggtgcgaagagtctattgagctagttagtagtcctccggcccctgaatgcggctaatcctaactgcggagcgcatgccctcaatccagagggtagtgcgtcgtaacgggcaactctgcagcggaaccgactactttgggtgtccgtgtttccttttactcttatattggctgcttatggtgacaattacggaattgttaccatatagctattggattggccatccggtgtgcaatagagctatcatttacctatttgttggatttgtaccactgtcattaaagtccataaccacactcaattatatactcactctcaatataactaaac

SEQ ID NO: 23657 - DNA, 596 bp, synthetic construct
  source 1..596: mol_type = other DNA
accagccatatcttgatcaagcacttctgtctccccggaccgagtatcaatagactgctcacgcggttgaaggagaaagcgttcgttacccggctaactacttcgagaaacctagtagcaccatggaagctgcggagtgtttcgctcagcacttcccccgtgtagatcaggtcgatgagtcactgcaatcctcacgggtgaccgtggcagtggctgcgttggcggcctgcctgtggggcaacccacaggacgctctaatgtggacatggtgcgaagagtctattgagctagttagtagtcctccggcccctgaatgcggctaatcctaactgcggagcgcatgccctcaatccagagggtagtgcgtcgtaacgggcaactctgcagcggaaccgactactttgggtgtccgtgtttccttttactcttatattggctgcttatggtgacaattacggaattgttaccatatagctattggattggccatccggtgtgcaatagagctatcatttacctatttgttggatttgtaccactgtcattaaagtccataaccacactcaattatatactcactctcaatataactaaac

SEQ ID NO: 23658 - DNA, 696 bp, synthetic construct
  source 1..696: mol_type = other DNA
actctgattttacgaaatccttgtgcgcctgttttatatcccttccctaattcgaaacgtagaagcaatgcgcaccactgatcaatagtaggcgtaacgcgccagttacgtcatgatcaagcatatctgttcccccggactgagtatcaatagactgcttacgcggttgaaggagaaaacgttcgttatccggctaactacttcgagaagcccagtaacaccatggaagctgcagggtgtttcgctcagcacttcccccgtgtagatcaggtcgatgagccactgcaatccccacaggtgattgtggcagtggctgcgttggcggcctgcctatggggagacccataggacgctctaatgtggacatggtgcgaagagcctattgagctagttagtagtcctccggcccctgaatgcggctaatcctaactgcggagcacatgccttcaacccagagggtagtgtgtcgtaatgggcaactctgcagcggaaccgactactttgggtgtccgtgtttctttttattcttatattggctgcttatggtgacaattacagaattgttaccatatagctattggattggccatccggtgtgtaatagagctgttatatacctatttgttggctttgtaccactaactttaaaatctataactaccctcaactttatattaaccctcaatacagttgaac

SEQ ID NO: 23659 - DNA, 646 bp, synthetic construct
  source 1..646: mol_type = other DNA
ttcgaaacgtagaagcaatgcgcaccactgatcaatagtaggcgtaacgcgccagttacgtcatgatcaagcatatctgttcccccggactgagtatcaatagactgcttacgcggttgaaggagaaaacgttcgttatccggctaactacttcgagaagcccagtaacaccatggaagctgcagggtgtttcgctcagcacttcccccgtgtagatcaggtcgatgagccactgcaatccccacaggtgattgtggcagtggctgcgttggcggcctgcctatggggagacccataggacgctctaatgtggacatggtgcgaagagcctattgagctagttagtagtcctccggcccctgaatgcggctaatcctaactgcggagcacatgccttcaacccagagggtagtgtgtcgtaatgggcaactctgcagcggaaccgactactttgggtgtccgtgtttctttttattcttatattggctgcttatggtgacaattacagaattgttaccatatagctattggattggccatccggtgtgtaatagagctgttatatacctatttgttggctttgtaccactaactttaaaatctataactaccctcaactttatattaaccctcaatacagttgaac

SEQ ID NO: 23660 - DNA, 596 bp, synthetic construct
  source 1..596: mol_type = other DNA
gccagttacgtcatgatcaagcatatctgttcccccggactgagtatcaatagactgcttacgcggttgaaggagaaaacgttcgttatccggctaactacttcgagaagcccagtaacaccatggaagctgcagggtgtttcgctcagcacttcccccgtgtagatcaggtcgatgagccactgcaatccccacaggtgattgtggcagtggctgcgttggcggcctgcctatggggagacccataggacgctctaatgtggacatggtgcgaagagcctattgagctagttagtagtcctccggcccctgaatgcggctaatcctaactgcggagcacatgccttcaacccagagggtagtgtgtcgtaatgggcaactctgcagcggaaccgactactttgggtgtccgtgtttctttttattcttatattggctgcttatggtgacaattacagaattgttaccatatagctattggattggccatccggtgtgtaatagagctgttatatacctatttgttggctttgtaccactaactttaaaatctataactaccctcaactttatattaaccctcaatacagttgaac

SEQ ID NO: 23661 - DNA, 546 bp, synthetic construct
  source 1..546: mol_type = other DNA
tagactgcttacgcggttgaaggagaaaacgttcgttatccggctaactacttcgagaagcccagtaacaccatggaagctgcagggtgtttcgctcagcacttcccccgtgtagatcaggtcgatgagccactgcaatccccacaggtgattgtggcagtggctgcgttggcggcctgcctatggggagacccataggacgctctaatgtggacatggtgcgaagagcctattgagctagttagtagtcctccggcccctgaatgcggctaatcctaactgcggagcacatgccttcaacccagagggtagtgtgtcgtaatgggcaactctgcagcggaaccgactactttgggtgtccgtgtttctttttattcttatattggctgcttatggtgacaattacagaattgttaccatatagctattggattggccatccggtgtgtaatagagctgttatatacctatttgttggctttgtaccactaactttaaaatctataactaccctcaactttatattaaccctcaatacagttgaac

SEQ ID NO: 23662 - DNA, 696 bp, synthetic construct
  source 1..696: mol_type = other DNA
cacactgactttgcggagtctttgtgcgcctgttttataacccttcccccaagtagcaacttagaagtattgcacaaccgcggccagtagtgggcgtgacgcgccagtcacgtcttggtcaagcacttctgtatccccggactgagtatcaatagactgctcgcgcggttgaaggagaaaacgttcgttatccggctaactacttcgggaaacctagtagcaccttggaagttgcagagtgtttcgctcagcactttccccgtgtagatcaggtcgatgagccactgtaaaccccacgggcgaccgtgacagtggctgcgttggcggcctgcccatggggtaacccatgggacgctctaatacagacatggtgtgaagagtctactgagctagttagtagtcctccggcccctgaatgcggctaatcctaactgcggagcacacaccctcaatccagggggcggtgtgtcgtaatgggtaactctgcagcggaaccgactactttgggtgtccgtgtttccttttattcctttactggctgcttatggtgacaattgaaaagttgttaccatatagctattggattggccatccggtgtctaacagagctattgtctacttgtttattggatacgtccctcttaatctcaaggtcattcgaactcttgattatatattgctccttaattataggaa

SEQ ID NO: 23663 - DNA, 646 bp, synthetic construct
  source 1..646: mol_type = other DNA
aagtagcaacttagaagtattgcacaaccgcggccagtagtgggcgtgacgcgccagtcacgtcttggtcaagcacttctgtatccccggactgagtatcaatagactgctcgcgcggttgaaggagaaaacgttcgttatccggctaactacttcgggaaacctagtagcaccttggaagttgcagagtgtttcgctcagcactttccccgtgtagatcaggtcgatgagccactgtaaaccccacgggcgaccgtgacagtggctgcgttggcggcctgcccatggggtaacccatgggacgctctaatacagacatggtgtgaagagtctactgagctagttagtagtcctccggcccctgaatgcggctaatcctaactgcggagcacacaccctcaatccagggggcggtgtgtcgtaatgggtaactctgcagcggaaccgactactttgggtgtccgtgtttccttttattcctttactggctgcttatggtgacaattgaaaagttgttaccatatagctattggattggccatccggtgtctaacagagctattgtctacttgtttattggatacgtccctcttaatctcaaggtcattcgaactcttgattatatattgctccttaattataggaa

SEQ ID NO: 23664 - DNA, 596 bp, synthetic construct
  source 1..596: mol_type = other DNA
gcgccagtcacgtcttggtcaagcacttctgtatccccggactgagtatcaatagactgctcgcgcggttgaaggagaaaacgttcgttatccggctaactacttcgggaaacctagtagcaccttggaagttgcagagtgtttcgctcagcactttccccgtgtagatcaggtcgatgagccactgtaaaccccacgggcgaccgtgacagtggctgcgttggcggcctgcccatggggtaacccatgggacgctctaatacagacatggtgtgaagagtctactgagctagttagtagtcctccggcccctgaatgcggctaatcctaactgcggagcacacaccctcaatccagggggcggtgtgtcgtaatgggtaactctgcagcggaaccgactactttgggtgtccgtgtttccttttattcctttactggctgcttatggtgacaattgaaaagttgttaccatatagctattggattggccatccggtgtctaacagagctattgtctacttgtttattggatacgtccctcttaatctcaaggtcattcgaactcttgattatatattgctccttaattataggaa

SEQ ID NO: 23665 - DNA, 546 bp, synthetic construct
  source 1..546: mol_type = other DNA
aatagactgctcgcgcggttgaaggagaaaacgttcgttatccggctaactacttcgggaaacctagtagcaccttggaagttgcagagtgtttcgctcagcactttccccgtgtagatcaggtcgatgagccactgtaaaccccacgggcgaccgtgacagtggctgcgttggcggcctgcccatggggtaacccatgggacgctctaatacagacatggtgtgaagagtctactgagctagttagtagtcctccggcccctgaatgcggctaatcctaactgcggagcacacaccctcaatccagggggcggtgtgtcgtaatgggtaactctgcagcggaaccgactactttgggtgtccgtgtttccttttattcctttactggctgcttatggtgacaattgaaaagttgttaccatatagctattggattggccatccggtgtctaacagagctattgtctacttgtttattggatacgtccctcttaatctcaaggtcattcgaactcttgattatatattgctccttaattataggaa

SEQ ID NO: 23666 - DNA, 696 bp, synthetic construct
  source 1..696: mol_type = other DNA
gcactctgattccgcggaatctttgtgtgcctgttttatcacccttcccccaaacttgcaacttagaagcagcacttcactgaccaatagcaggcgtggcgcaccagccatgtctaggtcaagcacttctgtttccccggactgagtatcaataggctgctcacgcggctgaaggagaaaacgttcgtcatccggctaactacttcgagaaacctagtagcaccggtgaagctgcagagtgtttcgctcagcacttcccccgtgtagatcaggtcgatgagtcactgcactccccacgggcgaccgtggcagtggctgcgctggcggcctgcctatgggtcaacccataggacgctctaatgtggacacggtgcgaagagtctattgagctagttagtagtcctccggcccctgaatgcggctaatcctaactgcggagcacatgcccccgaaccagggggtggtgtgtcgtaacgggcaactctgcagcggaaccgactactttgggtgaccgtgtttccttttgttcttattatggctgcttatggtgacaattgaagaattgttaccatatagctattggattggccatccagtgtctaacagagctatcatatacctatttgttggattcgttctattgtcatacacatcactcaatacattacattttattgtgagattaaatacaagaaa

SEQ ID NO: 23667 - DNA, 646 bp, synthetic construct
  source 1..646: mol_type = other DNA
caaacttgcaacttagaagcagcacttcactgaccaatagcaggcgtggcgcaccagccatgtctaggtcaagcacttctgtttccccggactgagtatcaataggctgctcacgcggctgaaggagaaaacgttcgtcatccggctaactacttcgagaaacctagtagcaccggtgaagctgcagagtgtttcgctcagcacttcccccgtgtagatcaggtcgatgagtcactgcactccccacgggcgaccgtggcagtggctgcgctggcggcctgcctatgggtcaacccataggacgctctaatgtggacacggtgcgaagagtctattgagctagttagtagtcctccggcccctgaatgcggctaatcctaactgcggagcacatgcccccgaaccagggggtggtgtgtcgtaacgggcaactctgcagcggaaccgactactttgggtgaccgtgtttccttttgttcttattatggctgcttatggtgacaattgaagaattgttaccatatagctattggattggccatccagtgtctaacagagctatcatatacctatttgttggattcgttctattgtcatacacatcactcaatacattacattttattgtgagattaaatacaagaaa

SEQ ID NO: 23668 - DNA, 596 bp, synthetic construct
  source 1..596: mol_type = other DNA
gcaccagccatgtctaggtcaagcacttctgtttccccggactgagtatcaataggctgctcacgcggctgaaggagaaaacgttcgtcatccggctaactacttcgagaaacctagtagcaccggtgaagctgcagagtgtttcgctcagcacttcccccgtgtagatcaggtcgatgagtcactgcactccccacgggcgaccgtggcagtggctgcgctggcggcctgcctatgggtcaacccataggacgctctaatgtggacacggtgcgaagagtctattgagctagttagtagtcctccggcccctgaatgcggctaatcctaactgcggagcacatgcccccgaaccagggggtggtgtgtcgtaacgggcaactctgcagcggaaccgactactttgggtgaccgtgtttccttttgttcttattatggctgcttatggtgacaattgaagaattgttaccatatagctattggattggccatccagtgtctaacagagctatcatatacctatttgttggattcgttctattgtcatacacatcactcaatacattacattttattgtgagattaaatacaagaaa

SEQ ID NO: 23669 - DNA, 546 bp, synthetic construct
  source 1..546: mol_type = other DNA
aataggctgctcacgcggctgaaggagaaaacgttcgtcatccggctaactacttcgagaaacctagtagcaccggtgaagctgcagagtgtttcgctcagcacttcccccgtgtagatcaggtcgatgagtcactgcactccccacgggcgaccgtggcagtggctgcgctggcggcctgcctatgggtcaacccataggacgctctaatgtggacacggtgcgaagagtctattgagctagttagtagtcctccggcccctgaatgcggctaatcctaactgcggagcacatgcccccgaaccagggggtggtgtgtcgtaacgggcaactctgcagcggaaccgactactttgggtgaccgtgtttccttttgttcttattatggctgcttatggtgacaattgaagaattgttaccatatagctattggattggccatccagtgtctaacagagctatcatatacctatttgttggattcgttctattgtcatacacatcactcaatacattacattttattgtgagattaaatacaagaaa

SEQ ID NO: 23670 - DNA, 696 bp, synthetic construct
  source 1..696: mol_type = other DNA
gcactctgattctgcggaatctttgtgcgcctgttttatcaccctctccctaaattcgtaacttagaagcaacactctactgaccaatagcgggcgtggcgcaccagccatgtctaggtcaagcacttctgtctccccggactgagtatcaataggctgctcacgcggctgaaggagaaaacgttcgtcatccggctaactacttcgagaagcctagtagcaccgttgaaactgcagagtgtttcgctcagcactttccccgtgtagatcaggtcgatgagtcactgcactccccacgggcgaccgtggcagtggctgcgttggcggcctgcctatgggtcaacccataggacgctctaatgtagacacggtgcgaagagtctatcgagctagttagtagtcctccggcccctgaatgcggctaatcctaactgcggagcacatgcccccgagccagagggtggtgtgtcgtaacgggtaactctgcagcggaaccgactactttgggtgtccgtgtttccttttattcttgatatggctgcttatggtgacaattgaagaattgttaccatatagctattggattggccatccggtgtctaacagagctattgtatacctgtttgttggatttgttccattatcacaaacatcactcaacacactacacttcattgtgagattgaacgcaagaaa

SEQ ID NO: 23671 - DNA, 646 bp, synthetic construct
  source 1..646: mol_type = other DNA
taaattcgtaacttagaagcaacactctactgaccaatagcgggcgtggcgcaccagccatgtctaggtcaagcacttctgtctccccggactgagtatcaataggctgctcacgcggctgaaggagaaaacgttcgtcatccggctaactacttcgagaagcctagtagcaccgttgaaactgcagagtgtttcgctcagcactttccccgtgtagatcaggtcgatgagtcactgcactccccacgggcgaccgtggcagtggctgcgttggcggcctgcctatgggtcaacccataggacgctctaatgtagacacggtgcgaagagtctatcgagctagttagtagtcctccggcccctgaatgcggctaatcctaactgcggagcacatgcccccgagccagagggtggtgtgtcgtaacgggtaactctgcagcggaaccgactactttgggtgtccgtgtttccttttattcttgatatggctgcttatggtgacaattgaagaattgttaccatatagctattggattggccatccggtgtctaacagagctattgtatacctgtttgttggatttgttccattatcacaaacatcactcaacacactacacttcattgtgagattgaacgcaagaaa

SEQ ID NO: 23672 - DNA, 596 bp, synthetic construct
  source 1..596: mol_type = other DNA
gcaccagccatgtctaggtcaagcacttctgtctccccggactgagtatcaataggctgctcacgcggctgaaggagaaaacgttcgtcatccggctaactacttcgagaagcctagtagcaccgttgaaactgcagagtgtttcgctcagcactttccccgtgtagatcaggtcgatgagtcactgcactccccacgggcgaccgtggcagtggctgcgttggcggcctgcctatgggtcaacccataggacgctctaatgtagacacggtgcgaagagtctatcgagctagttagtagtcctccggcccctgaatgcggctaatcctaactgcggagcacatgcccccgagccagagggtggtgtgtcgtaacgggtaactctgcagcggaaccgactactttgggtgtccgtgtttccttttattcttgatatggctgcttatggtgacaattgaagaattgttaccatatagctattggattggccatccggtgtctaacagagctattgtatacctgtttgttggatttgttccattatcacaaacatcactcaacacactacacttcattgtgagattgaacgcaagaaa

SEQ ID NO: 23673 - DNA, 546 bp, synthetic construct
  source 1..546: mol_type = other DNA
aataggctgctcacgcggctgaaggagaaaacgttcgtcatccggctaactacttcgagaagcctagtagcaccgttgaaactgcagagtgtttcgctcagcactttccccgtgtagatcaggtcgatgagtcactgcactccccacgggcgaccgtggcagtggctgcgttggcggcctgcctatgggtcaacccataggacgctctaatgtagacacggtgcgaagagtctatcgagctagttagtagtcctccggcccctgaatgcggctaatcctaactgcggagcacatgcccccgagccagagggtggtgtgtcgtaacgggtaactctgcagcggaaccgactactttgggtgtccgtgtttccttttattcttgatatggctgcttatggtgacaattgaagaattgttaccatatagctattggattggccatccggtgtctaacagagctattgtatacctgtttgttggatttgttccattatcacaaacatcactcaacacactacacttcattgtgagattgaacgcaagaaa

SEQ ID NO: 23674 - DNA, 696 bp, synthetic construct
  source 1..696: mol_type = other DNA
gtactccggtatcacggtacccttgtacgcctgttttatacccccttccccgcaacttagaagctttaaattcaagttcaatagaaggtggtacaaaccagtatcgccacgaacaagcacttctgttgccccggtgaaattgcataagctgtccccacggctgaaggcgattgatccgttacccgctcttgtacttcgagaagcctagtaccaccttggaattttcgatgcgttgcgctcagcactcaaccccagagtgtagcttaggctgatgagtctggacataccccaccggcgacggtggtccaggctgcgttggcggcctacctgtggcccaaagccacaggacgctagttatgaacaaggtgtgaagagcctattgagctacaagagagtcctccggcccctgaatgcggctaatcctaaccacggatcaggcgattgcaacccagcaattagcctgtcgtaatgcgcaagtctgtggcggaaccgactactttgggtgtccgtgtttctttttattcttacattggctgcttatggtgacaatcttagattgttatcataaagcaagttggattggccatccggtgaaagtcaaagttactatctatttatctgttggattttaccctaagaccactcatttacctgacttaattagaataattatactacttggaaattactatcaca

SEQ ID NO: 23675 - DNA, 646 bp, synthetic construct
  source 1..646: mol_type = other DNA
cgcaacttagaagctttaaattcaagttcaatagaaggtggtacaaaccagtatcgccacgaacaagcacttctgttgccccggtgaaattgcataagctgtccccacggctgaaggcgattgatccgttacccgctcttgtacttcgagaagcctagtaccaccttggaattttcgatgcgttgcgctcagcactcaaccccagagtgtagcttaggctgatgagtctggacataccccaccggcgacggtggtccaggctgcgttggcggcctacctgtggcccaaagccacaggacgctagttatgaacaaggtgtgaagagcctattgagctacaagagagtcctccggcccctgaatgcggctaatcctaaccacggatcaggcgattgcaacccagcaattagcctgtcgtaatgcgcaagtctgtggcggaaccgactactttgggtgtccgtgtttctttttattcttacattggctgcttatggtgacaatcttagattgttatcataaagcaagttggattggccatccggtgaaagtcaaagttactatctatttatctgttggattttaccctaagaccactcatttacctgacttaattagaataattatactacttggaaattactatcaca

SEQ ID NO: 23676 - DNA, 596 bp, synthetic construct
  source 1..596: mol_type = other DNA
gtatcgccacgaacaagcacttctgttgccccggtgaaattgcataagctgtccccacggctgaaggcgattgatccgttacccgctcttgtacttcgagaagcctagtaccaccttggaattttcgatgcgttgcgctcagcactcaaccccagagtgtagcttaggctgatgagtctggacataccccaccggcgacggtggtccaggctgcgttggcggcctacctgtggcccaaagccacaggacgctagttatgaacaaggtgtgaagagcctattgagctacaagagagtcctccggcccctgaatgcggctaatcctaaccacggatcaggcgattgcaacccagcaattagcctgtcgtaatgcgcaagtctgtggcggaaccgactactttgggtgtccgtgtttctttttattcttacattggctgcttatggtgacaatcttagattgttatcataaagcaagttggattggccatccggtgaaagtcaaagttactatctatttatctgttggattttaccctaagaccactcatttacctgacttaattagaataattatactacttggaaattactatcaca

SEQ ID NO: 23677 - DNA, 546 bp, synthetic construct
  source 1..546: mol_type = other DNA
gtccccacggctgaaggcgattgatccgttacccgctcttgtacttcgagaagcctagtaccaccttggaattttcgatgcgttgcgctcagcactcaaccccagagtgtagcttaggctgatgagtctggacataccccaccggcgacggtggtccaggctgcgttggcggcctacctgtggcccaaagccacaggacgctagttatgaacaaggtgtgaagagcctattgagctacaagagagtcctccggcccctgaatgcggctaatcctaaccacggatcaggcgattgcaacccagcaattagcctgtcgtaatgcgcaagtctgtggcggaaccgactactttgggtgtccgtgtttctttttattcttacattggctgcttatggtgacaatcttagattgttatcataaagcaagttggattggccatccggtgaaagtcaaagttactatctatttatctgttggattttaccctaagaccactcatttacctgacttaattagaataattatactacttggaaattactatcaca

SEQ ID NO: 23678 - DNA, 696 bp, synthetic construct
  source 1..696: mol_type = other DNA
gtacaccggtatcacggtacccttgtacgcctgttttatattcccttccccgtaacttagaagcaataaactcaagttcaatagaagggggtgcaaaccagcaccaccacgaacaagcacttctgtttccccggtgagattgcatagactgtccccacggttgaaagcgattgatccgttaaccgctcttgtacttcgagaagcctagtaccatcctggaatctacgatgcgttgcgctcagcactcaatcccagagtgtagcttaggtcgatgagtctggatactccccaccggcgacggtgatccaggctgcgttggcggcctacctgtggtccaaagccacaggacgctagtagtgaacagggtgtgaagagcctattgagctacatgagagtcctccggcccctgaatgcggctaatcccaaccacggagcaggtggctacaacccagtaactggcctgtcgtaacgcgcaagtctgtggcggaaccgactactttgggtgtccgtgtttccttttatttttataatggctgcttatggtgacaatcattgattgttatcataaagcgacttggattggccatccagcgagaatcagatcgattatttatttgtttgttggattcaccaccttatctacatacacaccaaacttaattagaatcactttattgattaggtatcattatcacg

SEQ ID NO: 23679 - DNA, 646 bp, synthetic construct
  source 1..646: mol_type = other DNA
cgtaacttagaagcaataaactcaagttcaatagaagggggtgcaaaccagcaccaccacgaacaagcacttctgtttccccggtgagattgcatagactgtccccacggttgaaagcgattgatccgttaaccgctcttgtacttcgagaagcctagtaccatcctggaatctacgatgcgttgcgctcagcactcaatcccagagtgtagcttaggtcgatgagtctggatactccccaccggcgacggtgatccaggctgcgttggcggcctacctgtggtccaaagccacaggacgctagtagtgaacagggtgtgaagagcctattgagctacatgagagtcctccggcccctgaatgcggctaatcccaaccacggagcaggtggctacaacccagtaactggcctgtcgtaacgcgcaagtctgtggcggaaccgactactttgggtgtccgtgtttccttttatttttataatggctgcttatggtgacaatcattgattgttatcataaagcgacttggattggccatccagcgagaatcagatcgattatttatttgtttgttggattcaccaccttatctacatacacaccaaacttaattagaatcactttattgattaggtatcattatcacg

SEQ ID NO: 23680 - DNA, 596 bp, synthetic construct
  source 1..596: mol_type = other DNA
gcaccaccacgaacaagcacttctgtttccccggtgagattgcatagactgtccccacggttgaaagcgattgatccgttaaccgctcttgtacttcgagaagcctagtaccatcctggaatctacgatgcgttgcgctcagcactcaatcccagagtgtagcttaggtcgatgagtctggatactccccaccggcgacggtgatccaggctgcgttggcggcctacctgtggtccaaagccacaggacgctagtagtgaacagggtgtgaagagcctattgagctacatgagagtcctccggcccctgaatgcggctaatcccaaccacggagcaggtggctacaacccagtaactggcctgtcgtaacgcgcaagtctgtggcggaaccgactactttgggtgtccgtgtttccttttatttttataatggctgcttatggtgacaatcattgattgttatcataaagcgacttggattggccatccagcgagaatcagatcgattatttatttgtttgttggattcaccaccttatctacatacacaccaaacttaattagaatcactttattgattaggtatcattatcacg

SEQ ID NO: 23681 - DNA, 546 bp, synthetic construct
  source 1..546: mol_type = other DNA
gtccccacggttgaaagcgattgatccgttaaccgctcttgtacttcgagaagcctagtaccatcctggaatctacgatgcgttgcgctcagcactcaatcccagagtgtagcttaggtcgatgagtctggatactccccaccggcgacggtgatccaggctgcgttggcggcctacctgtggtccaaagccacaggacgctagtagtgaacagggtgtgaagagcctattgagctacatgagagtcctccggcccctgaatgcggctaatcccaaccacggagcaggtggctacaacccagtaactggcctgtcgtaacgcgcaagtctgtggcggaaccgactactttgggtgtccgtgtttccttttatttttataatggctgcttatggtgacaatcattgattgttatcataaagcgacttggattggccatccagcgagaatcagatcgattatttatttgtttgttggattcaccaccttatctacatacacaccaaacttaattagaatcactttattgattaggtatcattatcacg

SEQ ID NO: 23682 - DNA, 696 bp, synthetic construct
  source 1..696: mol_type = other DNA
gtactccggtatcacggtacccttgtacgcctgttttatactccctcccccgtaacttagaagcaatcaaatcaagttcaataggagggggtacaaaccagtaccaccacgaacgagcacttctgtttccccggtgaagttgcatagactgttaccacggttgaaagcgaccgatccgttatccgctcatgtacttcgagaagcctagtacctccttggaatcttcgatgcgttgcgctcagcactcaaccccggagtgtagcttaggctgatgagtctggacagccctcaccggcgacggtggtccaggctgcgttggcggcctacctgtggcccaaagccacaggacgctagttgtgaacaaggtgtgaagagcctattgagctacatgagagtcctccggcccctgaatgcggctaatcctaaccacggagcaggcgatcgcaaaccagcaattagcctgtcgtaacgcgaaagtctgtggcggaaccgactactttgggtgaccgtgtttctcttatttttattcatggctgcttatggtgacaatcatagattgttatcataaagcgagttggattggccatccggtaaaagtcaagtatatcatttacttgtttgtaggatttattcctttgaacgtccatttactcaatcttatcagagtcacattactagtaagatctcactatcaca

SEQ ID NO: 23683 - DNA, 646 bp, synthetic construct
  source 1..646: mol_type = other DNA
cgtaacttagaagcaatcaaatcaagttcaataggagggggtacaaaccagtaccaccacgaacgagcacttctgtttccccggtgaagttgcatagactgttaccacggttgaaagcgaccgatccgttatccgctcatgtacttcgagaagcctagtacctccttggaatcttcgatgcgttgcgctcagcactcaaccccggagtgtagcttaggctgatgagtctggacagccctcaccggcgacggtggtccaggctgcgttggcggcctacctgtggcccaaagccacaggacgctagttgtgaacaaggtgtgaagagcctattgagctacatgagagtcctccggcccctgaatgcggctaatcctaaccacggagcaggcgatcgcaaaccagcaattagcctgtcgtaacgcgaaagtctgtggcggaaccgactactttgggtgaccgtgtttctcttatttttattcatggctgcttatggtgacaatcatagattgttatcataaagcgagttggattggccatccggtaaaagtcaagtatatcatttacttgtttgtaggatttattcctttgaacgtccatttactcaatcttatcagagtcacattactagtaagatctcactatcaca

SEQ ID NO: 23684 - DNA, 596 bp, synthetic construct
  source 1..596: mol_type = other DNA
gtaccaccacgaacgagcacttctgtttccccggtgaagttgcatagactgttaccacggttgaaagcgaccgatccgttatccgctcatgtacttcgagaagcctagtacctccttggaatcttcgatgcgttgcgctcagcactcaaccccggagtgtagcttaggctgatgagtctggacagccctcaccggcgacggtggtccaggctgcgttggcggcctacctgtggcccaaagccacaggacgctagttgtgaacaaggtgtgaagagcctattgagctacatgagagtcctccggcccctgaatgcggctaatcctaaccacggagcaggcgatcgcaaaccagcaattagcctgtcgtaacgcgaaagtctgtggcggaaccgactactttgggtgaccgtgtttctcttatttttattcatggctgcttatggtgacaatcatagattgttatcataaagcgagttggattggccatccggtaaaagtcaagtatatcatttacttgtttgtaggatttattcctttgaacgtccatttactcaatcttatcagagtcacattactagtaagatctcactatcaca

SEQ ID NO: 23685 - DNA, 546 bp, synthetic construct
  source 1..546: mol_type = other DNA
gttaccacggttgaaagcgaccgatccgttatccgctcatgtacttcgagaagcctagtacctccttggaatcttcgatgcgttgcgctcagcactcaaccccggagtgtagcttaggctgatgagtctggacagccctcaccggcgacggtggtccaggctgcgttggcggcctacctgtggcccaaagccacaggacgctagttgtgaacaaggtgtgaagagcctattgagctacatgagagtcctccggcccctgaatgcggctaatcctaaccacggagcaggcgatcgcaaaccagcaattagcctgtcgtaacgcgaaagtctgtggcggaaccgactactttgggtgaccgtgtttctcttatttttattcatggctgcttatggtgacaatcatagattgttatcataaagcgagttggattggccatccggtaaaagtcaagtatatcatttacttgtttgtaggatttattcctttgaacgtccatttactcaatcttatcagagtcacattactagtaagatctcactatcaca

SEQ ID NO: 23686 - DNA, 696 bp, synthetic construct
  source 1..696: mol_type = other DNA
gtactccggtattacggtacccttgtacgcctgttttatacccccttcccccgcaacttagattcaaacaaacacaagttcaataggagggggtacaaaccagtaccaccacgaacaagcacttctgtttccccggtgaggttgtatagactgttaccacggttgaaagcgactgatccgttatccgccttagtacttcgagaagcctagtatcaccttggaatctccgatgcgttgcgctcagcaatgtacccccattgtagcttaggccgatgagtctgggcattccccaccggcgacggtggcccaggctgcgttggcggcctacctatggtgaaaaccataggacgctagttgtgaacaaggtgcgaagagcctattgagctactaaggagtcctccggcccctgaatgcggctaatcccaaccacggagcaggtagttgcaaaccagcaaccagcctgtcgtaatgcgcaagtctgtggcggaaccgactactttgggtgtccgtgtttccttttattcttataatggctgcttatggtgacaatcatagattgttatcataaagcgaattggattggccatccggtgagaatcagatcgatcatttacctgtttgtcggatttaccccattggcatcgcacacgagtgacctaatcagaatagtgttgttgataaggtactactatcaca

SEQ ID NO: 23687 - DNA, 646 bp, synthetic construct
  source 1..646: mol_type = other DNA
ccgcaacttagattcaaacaaacacaagttcaataggagggggtacaaaccagtaccaccacgaacaagcacttctgtttccccggtgaggttgtatagactgttaccacggttgaaagcgactgatccgttatccgccttagtacttcgagaagcctagtatcaccttggaatctccgatgcgttgcgctcagcaatgtacccccattgtagcttaggccgatgagtctgggcattccccaccggcgacggtggcccaggctgcgttggcggcctacctatggtgaaaaccataggacgctagttgtgaacaaggtgcgaagagcctattgagctactaaggagtcctccggcccctgaatgcggctaatcccaaccacggagcaggtagttgcaaaccagcaaccagcctgtcgtaatgcgcaagtctgtggcggaaccgactactttgggtgtccgtgtttccttttattcttataatggctgcttatggtgacaatcatagattgttatcataaagcgaattggattggccatccggtgagaatcagatcgatcatttacctgtttgtcggatttaccccattggcatcgcacacgagtgacctaatcagaatagtgttgttgataaggtactactatcaca

SEQ ID NO: 23688 - DNA, 596 bp, synthetic construct
  source 1..596: mol_type = other DNA
cagtaccaccacgaacaagcacttctgtttccccggtgaggttgtatagactgttaccacggttgaaagcgactgatccgttatccgccttagtacttcgagaagcctagtatcaccttggaatctccgatgcgttgcgctcagcaatgtacccccattgtagcttaggccgatgagtctgggcattccccaccggcgacggtggcccaggctgcgttggcggcctacctatggtgaaaaccataggacgctagttgtgaacaaggtgcgaagagcctattgagctactaaggagtcctccggcccctgaatgcggctaatcccaaccacggagcaggtagttgcaaaccagcaaccagcctgtcgtaatgcgcaagtctgtggcggaaccgactactttgggtgtccgtgtttccttttattcttataatggctgcttatggtgacaatcatagattgttatcataaagcgaattggattggccatccggtgagaatcagatcgatcatttacctgtttgtcggatttaccccattggcatcgcacacgagtgacctaatcagaatagtgttgttgataaggtactactatcaca

SEQ ID NO: 23689 - DNA, 546 bp, synthetic construct
  source 1..546: mol_type = other DNA
ctgttaccacggttgaaagcgactgatccgttatccgccttagtacttcgagaagcctagtatcaccttggaatctccgatgcgttgcgctcagcaatgtacccccattgtagcttaggccgatgagtctgggcattccccaccggcgacggtggcccaggctgcgttggcggcctacctatggtgaaaaccataggacgctagttgtgaacaaggtgcgaagagcctattgagctactaaggagtcctccggcccctgaatgcggctaatcccaaccacggagcaggtagttgcaaaccagcaaccagcctgtcgtaatgcgcaagtctgtggcggaaccgactactttgggtgtccgtgtttccttttattcttataatggctgcttatggtgacaatcatagattgttatcataaagcgaattggattggccatccggtgagaatcagatcgatcatttacctgtttgtcggatttaccccattggcatcgcacacgagtgacctaatcagaatagtgttgttgataaggtactactatcaca

SEQ ID NO: 23690 - DNA, 696 bp, synthetic construct
  source 1..696: mol_type = other DNA
gtactctggtactacggtacctttgtacgcctgttttatactccctcccccatgcaacattagaagcaattcacaaagttcaatagagggggtacaaaccagtaccaccacgaacaagcacttctgtttccccggtgatctcgtataggccgtacccacggctgaaaacaagtgatccgttatccgcttaggtacttcgagaaacctagtatcaccttgggatcttcgacgcgttgcactcagcactctaccccgagtgtagcttaggctgatgagtctgggcattccccaccggtgacggtggcccaggctgcgttggcggcctacccatggctaacgccatgggacgctagttgtgaacaaggtgtgaagagcctattgagctacctaagagtcctccggcccctgaatgcggctaatcccaaccacggagcaagtgccttcaatccagagggtggcttgtcgtaacgcgcaagtctgtggcggaaccgactactttgggtgtccgtgtttccttttatttttattacggctgcttatggtgacaatcattgattgccatcataaagcgagttggattggccatccggtgaaagttaagtatctcgtccacttatctgttggacttactccattaactcaactcacgcctgatttgatatctatagtgttattgatttggaaaaagctatcata

SEQ ID NO: 23691 - DNA, 646 bp, synthetic construct
  source 1..646: mol_type = other DNA
catgcaacattagaagcaattcacaaagttcaatagagggggtacaaaccagtaccaccacgaacaagcacttctgtttccccggtgatctcgtataggccgtacccacggctgaaaacaagtgatccgttatccgcttaggtacttcgagaaacctagtatcaccttgggatcttcgacgcgttgcactcagcactctaccccgagtgtagcttaggctgatgagtctgggcattccccaccggtgacggtggcccaggctgcgttggcggcctacccatggctaacgccatgggacgctagttgtgaacaaggtgtgaagagcctattgagctacctaagagtcctccggcccctgaatgcggctaatcccaaccacggagcaagtgccttcaatccagagggtggcttgtcgtaacgcgcaagtctgtggcggaaccgactactttgggtgtccgtgtttccttttatttttattacggctgcttatggtgacaatcattgattgccatcataaagcgagttggattggccatccggtgaaagttaagtatctcgtccacttatctgttggacttactccattaactcaactcacgcctgatttgatatctatagtgttattgatttggaaaaagctatcata

SEQ ID NO: 23692 - DNA, 596 bp, synthetic construct
  source 1..596: mol_type = other DNA
agtaccaccacgaacaagcacttctgtttccccggtgatctcgtataggccgtacccacggctgaaaacaagtgatccgttatccgcttaggtacttcgagaaacctagtatcaccttgggatcttcgacgcgttgcactcagcactctaccccgagtgtagcttaggctgatgagtctgggcattccccaccggtgacggtggcccaggctgcgttggcggcctacccatggctaacgccatgggacgctagttgtgaacaaggtgtgaagagcctattgagctacctaagagtcctccggcccctgaatgcggctaatcccaaccacggagcaagtgccttcaatccagagggtggcttgtcgtaacgcgcaagtctgtggcggaaccgactactttgggtgtccgtgtttccttttatttttattacggctgcttatggtgacaatcattgattgccatcataaagcgagttggattggccatccggtgaaagttaagtatctcgtccacttatctgttggacttactccattaactcaactcacgcctgatttgatatctatagtgttattgatttggaaaaagctatcata

SEQ ID NO: 23693 - DNA, 546 bp, synthetic construct
  source 1..546: mol_type = other DNA
cgtacccacggctgaaaacaagtgatccgttatccgcttaggtacttcgagaaacctagtatcaccttgggatcttcgacgcgttgcactcagcactctaccccgagtgtagcttaggctgatgagtctgggcattccccaccggtgacggtggcccaggctgcgttggcggcctacccatggctaacgccatgggacgctagttgtgaacaaggtgtgaagagcctattgagctacctaagagtcctccggcccctgaatgcggctaatcccaaccacggagcaagtgccttcaatccagagggtggcttgtcgtaacgcgcaagtctgtggcggaaccgactactttgggtgtccgtgtttccttttatttttattacggctgcttatggtgacaatcattgattgccatcataaagcgagttggattggccatccggtgaaagttaagtatctcgtccacttatctgttggacttactccattaactcaactcacgcctgatttgatatctatagtgttattgatttggaaaaagctatcata

SEQ ID NO: 23694 - DNA, 696 bp, synthetic construct
  source 1..696: mol_type = other DNA
gtactccggtatcacggtacccttgtacgcctgttttatactcccttccccgtaacttagaagtatacaaaccaagttcaatagaagggggtacaaaccagtaccaccacgaacaagcacttctgtttccccggtgaagttgcatagattgtccccacggtcgaaagcgactgatccgttatccgctcttgtacttcgggaagcctagtatcaccttcggatcttcgatgcgttgcgctcagcactcaaccccagagtgtagcttaggtcgatgagtctggacgaacctcactggtgacagtggtccaggctgcgttggcggcctacctgtggcccaaagccacaggacgctagttgtgaacaaggtgtgaagagcctactgagctacatgagagtcctccggcccctgaatgcggctaatcccaaccacggagcaggtggtcacaaaccagtggtttgcctgtcgtaacgcgaaagtctgtggcggaaccgactactttgggtgtccgtgtttccttttattcttattatggctgcttatggtgacaatcttagattgttatcataaagcgaattggattggccatccggggaaaattaagcatatcatacacttgtttgttggattcacccctctgattacacatactcttggcttgattaggattgttgcattgataagacactattgttgca

SEQ ID NO: 23695 - DNA, 646 bp, synthetic construct
  source 1..646: mol_type = other DNA
cgtaacttagaagtatacaaaccaagttcaatagaagggggtacaaaccagtaccaccacgaacaagcacttctgtttccccggtgaagttgcatagattgtccccacggtcgaaagcgactgatccgttatccgctcttgtacttcgggaagcctagtatcaccttcggatcttcgatgcgttgcgctcagcactcaaccccagagtgtagcttaggtcgatgagtctggacgaacctcactggtgacagtggtccaggctgcgttggcggcctacctgtggcccaaagccacaggacgctagttgtgaacaaggtgtgaagagcctactgagctacatgagagtcctccggcccctgaatgcggctaatcccaaccacggagcaggtggtcacaaaccagtggtttgcctgtcgtaacgcgaaagtctgtggcggaaccgactactttgggtgtccgtgtttccttttattcttattatggctgcttatggtgacaatcttagattgttatcataaagcgaattggattggccatccggggaaaattaagcatatcatacacttgtttgttggattcacccctctgattacacatactcttggcttgattaggattgttgcattgataagacactattgttgca

SEQ ID NO: 23696 - DNA, 596 bp, synthetic construct
  source 1..596: mol_type = other DNA
gtaccaccacgaacaagcacttctgtttccccggtgaagttgcatagattgtccccacggtcgaaagcgactgatccgttatccgctcttgtacttcgggaagcctagtatcaccttcggatcttcgatgcgttgcgctcagcactcaaccccagagtgtagcttaggtcgatgagtctggacgaacctcactggtgacagtggtccaggctgcgttggcggcctacctgtggcccaaagccacaggacgctagttgtgaacaaggtgtgaagagcctactgagctacatgagagtcctccggcccctgaatgcggctaatcccaaccacggagcaggtggtcacaaaccagtggtttgcctgtcgtaacgcgaaagtctgtggcggaaccgactactttgggtgtccgtgtttccttttattcttattatggctgcttatggtgacaatcttagattgttatcataaagcgaattggattggccatccggggaaaattaagcatatcatacacttgtttgttggattcacccctctgattacacatactcttggcttgattaggattgttgcattgataagacactattgttgca

SEQ ID NO: 23697 - DNA, 546 bp, synthetic construct
  source 1..546: mol_type = other DNA
gtccccacggtcgaaagcgactgatccgttatccgctcttgtacttcgggaagcctagtatcaccttcggatcttcgatgcgttgcgctcagcactcaaccccagagtgtagcttaggtcgatgagtctggacgaacctcactggtgacagtggtccaggctgcgttggcggcctacctgtggcccaaagccacaggacgctagttgtgaacaaggtgtgaagagcctactgagctacatgagagtcctccggcccctgaatgcggctaatcccaaccacggagcaggtggtcacaaaccagtggtttgcctgtcgtaacgcgaaagtctgtggcggaaccgactactttgggtgtccgtgtttccttttattcttattatggctgcttatggtgacaatcttagattgttatcataaagcgaattggattggccatccggggaaaattaagcatatcatacacttgtttgttggattcacccctctgattacacatactcttggcttgattaggattgttgcattgataagacactattgttgca

SEQ ID NO: 23698 - DNA, 696 bp, synthetic construct
  source 1..696: mol_type = other DNA
gtactccggtatcacggtacccttgtacgcctgttttatactcccttcccccgtaacttagaagaaataaaccaagttcaatagaagggggtacaaaccagtaccaccacgaacaagcacttctgtttccccggtgaagttgtataaactgtatccacggttgaaggcgactgatccgttatccgcttttgtacttcgagaagcctagtatcatcttggaatcttcgatgcgttgcgctcagcactcaaccccagagtgtagcttgggctgatgagtctggacacccctcaccggtgacggtggtccaggctgcgttggcggcctacctgtggcccaaagccacaggacgctagttgtgaacaaggtgtgaagagcctattgagctacgaaagagtcctccggcccctgaatgcggctaatcctaaccacggagcaagggtgcgcaaaccagtgcatgccttgtcgtaacgcgcaagtctgtggcggaaccgactactttgggtgtccgtgtttccttttattcttataatggctgcttatggtgacaatcatagattgttatcataaagcgaattggattggccatccggcgaaagtgaaatacattgtttatctttttgttggattcactccaaacacttccccttcttttaaactcatcactacggtcttgttgatcagagactcatatcaca

SEQ ID NO: 23699 - DNA, 646 bp, synthetic construct
  source 1..646: mol_type = other DNA
ccgtaacttagaagaaataaaccaagttcaatagaagggggtacaaaccagtaccaccacgaacaagcacttctgtttccccggtgaagttgtataaactgtatccacggttgaaggcgactgatccgttatccgcttttgtacttcgagaagcctagtatcatcttggaatcttcgatgcgttgcgctcagcactcaaccccagagtgtagcttgggctgatgagtctggacacccctcaccggtgacggtggtccaggctgcgttggcggcctacctgtggcccaaagccacaggacgctagttgtgaacaaggtgtgaagagcctattgagctacgaaagagtcctccggcccctgaatgcggctaatcctaaccacggagcaagggtgcgcaaaccagtgcatgccttgtcgtaacgcgcaagtctgtggcggaaccgactactttgggtgtccgtgtttccttttattcttataatggctgcttatggtgacaatcatagattgttatcataaagcgaattggattggccatccggcgaaagtgaaatacattgtttatctttttgttggattcactccaaacacttccccttcttttaaactcatcactacggtcttgttgatcagagactcatatcaca

SEQ ID NO: 23700 - DNA, 596 bp, synthetic construct
  source 1..596: mol_type = other DNA
gtaccaccacgaacaagcacttctgtttccccggtgaagttgtataaactgtatccacggttgaaggcgactgatccgttatccgcttttgtacttcgagaagcctagtatcatcttggaatcttcgatgcgttgcgctcagcactcaaccccagagtgtagcttgggctgatgagtctggacacccctcaccggtgacggtggtccaggctgcgttggcggcctacctgtggcccaaagccacaggacgctagttgtgaacaaggtgtgaagagcctattgagctacgaaagagtcctccggcccctgaatgcggctaatcctaaccacggagcaagggtgcgcaaaccagtgcatgccttgtcgtaacgcgcaagtctgtggcggaaccgactactttgggtgtccgtgtttccttttattcttataatggctgcttatggtgacaatcatagattgttatcataaagcgaattggattggccatccggcgaaagtgaaatacattgtttatctttttgttggattcactccaaacacttccccttcttttaaactcatcactacggtcttgttgatcagagactcatatcaca

SEQ ID NO: 23701 - DNA, 546 bp, synthetic construct
  source 1..546: mol_type = other DNA
gtatccacggttgaaggcgactgatccgttatccgcttttgtacttcgagaagcctagtatcatcttggaatcttcgatgcgttgcgctcagcactcaaccccagagtgtagcttgggctgatgagtctggacacccctcaccggtgacggtggtccaggctgcgttggcggcctacctgtggcccaaagccacaggacgctagttgtgaacaaggtgtgaagagcctattgagctacgaaagagtcctccggcccctgaatgcggctaatcctaaccacggagcaagggtgcgcaaaccagtgcatgccttgtcgtaacgcgcaagtctgtggcggaaccgactactttgggtgtccgtgtttccttttattcttataatggctgcttatggtgacaatcatagattgttatcataaagcgaattggattggccatccggcgaaagtgaaatacattgtttatctttttgttggattcactccaaacacttccccttcttttaaactcatcactacggtcttgttgatcagagactcatatcaca

SEQ ID NO: 23702 - DNA, 696 bp, synthetic construct
  source 1..696: mol_type = other DNA
gtactctggtatcatggtacccttgtacgcctgttttatactcccttaccccgtaacttagaagcaataaaccaagttcaatagaagggggtacaaaccagtaccaccgcgaacaagcacttctgttgccccggtgaagttgcatagactgtgcccacggttaaaagcgactgatccgttatccgctcttgtacttcgagaaacctagtatcatcttggaatcttcgatgcgttgcgctcaacactcgaccccagagtgtagcttaggtcgatgagtctggacactcctcactggtgacagtggtccaggctgcgttggcggcctacctgtggcccaaagccacaggacgctagtagtgaacaaggtgtgaagagtctattgagctacaagtgagtcctccggcccctgaatgcggctaatcccaaccacggagcaagtgctcacactccagtgagtagcttgtcgtaacgggtaactctgtggcggaaccgactactttgggtgtccgtgtttccttttattcttataatggctgcttatggtgacaatcatagattgttatcataaagcgaattggattggccatccggtgaaagtgaaatactttgcttaactttttgttggattcactccagtcactttcctttcttttaaactcatcaccacagtcttgttgttcagagactcatatcaca

SEQ ID NO: 23703 - DNA, 646 bp, synthetic construct
  source 1..646: mol_type = other DNA
ccgtaacttagaagcaataaaccaagttcaatagaagggggtacaaaccagtaccaccgcgaacaagcacttctgttgccccggtgaagttgcatagactgtgcccacggttaaaagcgactgatccgttatccgctcttgtacttcgagaaacctagtatcatcttggaatcttcgatgcgttgcgctcaacactcgaccccagagtgtagcttaggtcgatgagtctggacactcctcactggtgacagtggtccaggctgcgttggcggcctacctgtggcccaaagccacaggacgctagtagtgaacaaggtgtgaagagtctattgagctacaagtgagtcctccggcccctgaatgcggctaatcccaaccacggagcaagtgctcacactccagtgagtagcttgtcgtaacgggtaactctgtggcggaaccgactactttgggtgtccgtgtttccttttattcttataatggctgcttatggtgacaatcatagattgttatcataaagcgaattggattggccatccggtgaaagtgaaatactttgcttaactttttgttggattcactccagtcactttcctttcttttaaactcatcaccacagtcttgttgttcagagactcatatcaca

SEQ ID NO: 23704 - DNA, 596 bp, synthetic construct
  source 1..596: mol_type = other DNA
gtaccaccgcgaacaagcacttctgttgccccggtgaagttgcatagactgtgcccacggttaaaagcgactgatccgttatccgctcttgtacttcgagaaacctagtatcatcttggaatcttcgatgcgttgcgctcaacactcgaccccagagtgtagcttaggtcgatgagtctggacactcctcactggtgacagtggtccaggctgcgttggcggcctacctgtggcccaaagccacaggacgctagtagtgaacaaggtgtgaagagtctattgagctacaagtgagtcctccggcccctgaatgcggctaatcccaaccacggagcaagtgctcacactccagtgagtagcttgtcgtaacgggtaactctgtggcggaaccgactactttgggtgtccgtgtttccttttattcttataatggctgcttatggtgacaatcatagattgttatcataaagcgaattggattggccatccggtgaaagtgaaatactttgcttaactttttgttggattcactccagtcactttcctttcttttaaactcatcaccacagtcttgttgttcagagactcatatcaca

SEQ ID NO: 23705 - DNA, 546 bp, synthetic construct
  source 1..546: mol_type = other DNA
gtgcccacggttaaaagcgactgatccgttatccgctcttgtacttcgagaaacctagtatcatcttggaatcttcgatgcgttgcgctcaacactcgaccccagagtgtagcttaggtcgatgagtctggacactcctcactggtgacagtggtccaggctgcgttggcggcctacctgtggcccaaagccacaggacgctagtagtgaacaaggtgtgaagagtctattgagctacaagtgagtcctccggcccctgaatgcggctaatcccaaccacggagcaagtgctcacactccagtgagtagcttgtcgtaacgggtaactctgtggcggaaccgactactttgggtgtccgtgtttccttttattcttataatggctgcttatggtgacaatcatagattgttatcataaagcgaattggattggccatccggtgaaagtgaaatactttgcttaactttttgttggattcactccagtcactttcctttcttttaaactcatcaccacagtcttgttgttcagagactcatatcaca

SEQ ID NO: 23706 - DNA, 696 bp, synthetic construct
  source 1..696: mol_type = other DNA
gtactctggtattacggtacctttgtacgcctgttttatactccctccctcgtaacttagaagaaacaaatcaagttcaacaggagggggtacaaaccagtaccaccacgaacaagcacttctgtctccccggtgacgttgcatagactgtacccacggtcgaaagcgattgatccgttatccgctcttgtacttcgagaagcctagtatcatcttggaatcttcgatgcgttgcgctcagcactcaaccccagagtgtagcttaggtcgatgagtctggacgttccccaccggcgacggtggtccaggctgcgttggcggcctacctgtggcccaaagccacaggacgctagttgtgaacaaggtgtgaagagcctattgagctacaggagagtcctccggcccctgaatgcggctaatcccaaccacggagcaggggtgcataaaccaatgcataccttgtcgtaacgcgcaagtctgtggcggaaccgactactttgggtgtccgtgtttccttttattttttcattggctgcttatggtgacaatcatagattgttatcataaagcgacttggattggccatccggtgagagtgaaatacattgtttacttgttcattggatttactccactcaactctttcgcttacaaactcattacaacaactctgttgattgaaacaacaatactaca

SEQ ID NO: 23707 - DNA, 646 bp, synthetic construct
  source 1..646: mol_type = other DNA
cgtaacttagaagaaacaaatcaagttcaacaggagggggtacaaaccagtaccaccacgaacaagcacttctgtctccccggtgacgttgcatagactgtacccacggtcgaaagcgattgatccgttatccgctcttgtacttcgagaagcctagtatcatcttggaatcttcgatgcgttgcgctcagcactcaaccccagagtgtagcttaggtcgatgagtctggacgttccccaccggcgacggtggtccaggctgcgttggcggcctacctgtggcccaaagccacaggacgctagttgtgaacaaggtgtgaagagcctattgagctacaggagagtcctccggcccctgaatgcggctaatcccaaccacggagcaggggtgcataaaccaatgcataccttgtcgtaacgcgcaagtctgtggcggaaccgactactttgggtgtccgtgtttccttttattttttcattggctgcttatggtgacaatcatagattgttatcataaagcgacttggattggccatccggtgagagtgaaatacattgtttacttgttcattggatttactccactcaactctttcgcttacaaactcattacaacaactctgttgattgaaacaacaatactaca

SEQ ID NO: 23708 - DNA, 596 bp, synthetic construct
  source 1..596: mol_type = other DNA
taccaccacgaacaagcacttctgtctccccggtgacgttgcatagactgtacccacggtcgaaagcgattgatccgttatccgctcttgtacttcgagaagcctagtatcatcttggaatcttcgatgcgttgcgctcagcactcaaccccagagtgtagcttaggtcgatgagtctggacgttccccaccggcgacggtggtccaggctgcgttggcggcctacctgtggcccaaagccacaggacgctagttgtgaacaaggtgtgaagagcctattgagctacaggagagtcctccggcccctgaatgcggctaatcccaaccacggagcaggggtgcataaaccaatgcataccttgtcgtaacgcgcaagtctgtggcggaaccgactactttgggtgtccgtgtttccttttattttttcattggctgcttatggtgacaatcatagattgttatcataaagcgacttggattggccatccggtgagagtgaaatacattgtttacttgttcattggatttactccactcaactctttcgcttacaaactcattacaacaactctgttgattgaaacaacaatactaca

SEQ ID NO: 23709 - DNA, 546 bp, synthetic construct
  source 1..546: mol_type = other DNA
tacccacggtcgaaagcgattgatccgttatccgctcttgtacttcgagaagcctagtatcatcttggaatcttcgatgcgttgcgctcagcactcaaccccagagtgtagcttaggtcgatgagtctggacgttccccaccggcgacggtggtccaggctgcgttggcggcctacctgtggcccaaagccacaggacgctagttgtgaacaaggtgtgaagagcctattgagctacaggagagtcctccggcccctgaatgcggctaatcccaaccacggagcaggggtgcataaaccaatgcataccttgtcgtaacgcgcaagtctgtggcggaaccgactactttgggtgtccgtgtttccttttattttttcattggctgcttatggtgacaatcatagattgttatcataaagcgacttggattggccatccggtgagagtgaaatacattgtttacttgttcattggatttactccactcaactctttcgcttacaaactcattacaacaactctgttgattgaaacaacaatactaca

SEQ ID NO: 23710 - DNA, 696 bp, synthetic construct
  source 1..696: mol_type = other DNA
cacactggtatcaaggtacctttgtgcgcctgttttacaaaccctccccccccttgtaacaaacttagaagcaatgcacaccgatcaatagcgggcgcggcacgccagctgcgtcttgatcaagcacttctgtctccccggaccgagtatcaatagactgcttgcgtggttgaaggagaaagcgtccgttacccgaccaactacttcgagaagcccagtagcgccatggaagctgcgaagcgtttcgctcagcacacccccagtgtagatcaggtcgatgagtcaccgcattccccacgggcgaccgtggcggtggctgcgttggcggcctgcctacggggtaacccgtaggacgcttcaatgtagacatggtgcgaagagtcgattgagctagttggtaatcctccggcccctgaatgcggctaatcctaactgcggagcacgtgccttcaacccagagggtggcgtgtcgtaacgggcaactctgcagcggaaccgactactttgggtgtccgtgtttctttttattttgtactggctgcttatggtgacaattgaaggattgttaccatatagctattggattggccatccggtgcctaacagagcaattatttacctctttgttgggttcgtaccattcaataaggctaattaccaaatcttgtgttacatcctcagattgaacacatcgaa

SEQ ID NO: 23711 - DNA, 646 bp, synthetic construct
  source 1..646: mol_type = other DNA
cccttgtaacaaacttagaagcaatgcacaccgatcaatagcgggcgcggcacgccagctgcgtcttgatcaagcacttctgtctccccggaccgagtatcaatagactgcttgcgtggttgaaggagaaagcgtccgttacccgaccaactacttcgagaagcccagtagcgccatggaagctgcgaagcgtttcgctcagcacacccccagtgtagatcaggtcgatgagtcaccgcattccccacgggcgaccgtggcggtggctgcgttggcggcctgcctacggggtaacccgtaggacgcttcaatgtagacatggtgcgaagagtcgattgagctagttggtaatcctccggcccctgaatgcggctaatcctaactgcggagcacgtgccttcaacccagagggtggcgtgtcgtaacgggcaactctgcagcggaaccgactactttgggtgtccgtgtttctttttattttgtactggctgcttatggtgacaattgaaggattgttaccatatagctattggattggccatccggtgcctaacagagcaattatttacctctttgttgggttcgtaccattcaataaggctaattaccaaatcttgtgttacatcctcagattgaacacatcgaa

SEQ ID NO: 23712 - DNA, 596 bp, synthetic construct
  source 1..596: mol_type = other DNA
cacgccagctgcgtcttgatcaagcacttctgtctccccggaccgagtatcaatagactgcttgcgtggttgaaggagaaagcgtccgttacccgaccaactacttcgagaagcccagtagcgccatggaagctgcgaagcgtttcgctcagcacacccccagtgtagatcaggtcgatgagtcaccgcattccccacgggcgaccgtggcggtggctgcgttggcggcctgcctacggggtaacccgtaggacgcttcaatgtagacatggtgcgaagagtcgattgagctagttggtaatcctccggcccctgaatgcggctaatcctaactgcggagcacgtgccttcaacccagagggtggcgtgtcgtaacgggcaactctgcagcggaaccgactactttgggtgtccgtgtttctttttattttgtactggctgcttatggtgacaattgaaggattgttaccatatagctattggattggccatccggtgcctaacagagcaattatttacctctttgttgggttcgtaccattcaataaggctaattaccaaatcttgtgttacatcctcagattgaacacatcgaa

SEQ ID NO: 23713 - DNA, 546 bp, synthetic construct
  source 1..546: mol_type = other DNA
caatagactgcttgcgtggttgaaggagaaagcgtccgttacccgaccaactacttcgagaagcccagtagcgccatggaagctgcgaagcgtttcgctcagcacacccccagtgtagatcaggtcgatgagtcaccgcattccccacgggcgaccgtggcggtggctgcgttggcggcctgcctacggggtaacccgtaggacgcttcaatgtagacatggtgcgaagagtcgattgagctagttggtaatcctccggcccctgaatgcggctaatcctaactgcggagcacgtgccttcaacccagagggtggcgtgtcgtaacgggcaactctgcagcggaaccgactactttgggtgtccgtgtttctttttattttgtactggctgcttatggtgacaattgaaggattgttaccatatagctattggattggccatccggtgcctaacagagcaattatttacctctttgttgggttcgtaccattcaataaggctaattaccaaatcttgtgttacatcctcagattgaacacatcgaa

SEQ ID NO: 23714 - DNA, 697 bp, synthetic construct
  source 1..697: mol_type = other DNA
gcactctgattctacggaatctttgtgcgcctgttttacaacccttcccaaaatctgcaacttagaagttatgcacattattgatcaatagcaggcgtggcacaccagtcatgtcttgatcgagcacttctgtatccccggactgagtatcaatagactgctcacgtggtcgaaggagaaaacgttcgttatccggctaactacttcgagaagcctagtaacaccgttgaaactgcggagcgtttcgttcagcacttcccccgtgtagatcaggtcgatgagtcactgcttaccccacgggcgaccgtggcagtggctgcgttggcggcctgcctatggggcaacccataggacgctctaaagtggacatggtgcgaagagcctattgagctagttagtagtcctccggcccctgaatgcggctaatcctaactgcggagcgcatgccctcacgccagagggtggtgcgtcgtaacgggcaactctgcagcggaaccgactactttgggtgtccgtgtttctttttattctcattatggctgcttatggtgacaattaaggaattgttaccatatagctattggattggccatccggtgtgcaacagagctattatctacttatttgttggatacattccattaacacttaaatcccttaacacattgcaatacattctaacactgaacgcaagaaa

SEQ ID NO: 23715 - DNA, 647 bp, synthetic construct
  source 1..647: mol_type = other DNA
aaatctgcaacttagaagttatgcacattattgatcaatagcaggcgtggcacaccagtcatgtcttgatcgagcacttctgtatccccggactgagtatcaatagactgctcacgtggtcgaaggagaaaacgttcgttatccggctaactacttcgagaagcctagtaacaccgttgaaactgcggagcgtttcgttcagcacttcccccgtgtagatcaggtcgatgagtcactgcttaccccacgggcgaccgtggcagtggctgcgttggcggcctgcctatggggcaacccataggacgctctaaagtggacatggtgcgaagagcctattgagctagttagtagtcctccggcccctgaatgcggctaatcctaactgcggagcgcatgccctcacgccagagggtggtgcgtcgtaacgggcaactctgcagcggaaccgactactttgggtgtccgtgtttctttttattctcattatggctgcttatggtgacaattaaggaattgttaccatatagctattggattggccatccggtgtgcaacagagctattatctacttatttgttggatacattccattaacacttaaatcccttaacacattgcaatacattctaacactgaacgcaagaaa

SEQ ID NO: 23716 - DNA, 597 bp, synthetic construct
  source 1..597: mol_type = other DNA
cacaccagtcatgtcttgatcgagcacttctgtatccccggactgagtatcaatagactgctcacgtggtcgaaggagaaaacgttcgttatccggctaactacttcgagaagcctagtaacaccgttgaaactgcggagcgtttcgttcagcacttcccccgtgtagatcaggtcgatgagtcactgcttaccccacgggcgaccgtggcagtggctgcgttggcggcctgcctatggggcaacccataggacgctctaaagtggacatggtgcgaagagcctattgagctagttagtagtcctccggcccctgaatgcggctaatcctaactgcggagcgcatgccctcacgccagagggtggtgcgtcgtaacgggcaactctgcagcggaaccgactactttgggtgtccgtgtttctttttattctcattatggctgcttatggtgacaattaaggaattgttaccatatagctattggattggccatccggtgtgcaacagagctattatctacttatttgttggatacattccattaacacttaaatcccttaacacattgcaatacattctaacactgaacgcaagaaa

SEQ ID NO: 23717 - DNA, 547 bp, synthetic construct
  source 1..547: mol_type = other DNA
caatagactgctcacgtggtcgaaggagaaaacgttcgttatccggctaactacttcgagaagcctagtaacaccgttgaaactgcggagcgtttcgttcagcacttcccccgtgtagatcaggtcgatgagtcactgcttaccccacgggcgaccgtggcagtggctgcgttggcggcctgcctatggggcaacccataggacgctctaaagtggacatggtgcgaagagcctattgagctagttagtagtcctccggcccctgaatgcggctaatcctaactgcggagcgcatgccctcacgccagagggtggtgcgtcgtaacgggcaactctgcagcggaaccgactactttgggtgtccgtgtttctttttattctcattatggctgcttatggtgacaattaaggaattgttaccatatagctattggattggccatccggtgtgcaacagagctattatctacttatttgttggatacattccattaacacttaaatcccttaacacattgcaatacattctaacactgaacgcaagaaa

SEQ ID NO: 23718 - DNA, 697 bp, synthetic construct
  source 1..697: mol_type = other DNA
cactctgattccacggaatctttgtgcgcctgttttataacccccctccccacctcgcaacttagaagcaacgcgcatcactgatcaacagcaggcatggcgcgccagccatgtcttgatcaagcacttctgtttccccggactgagtatcaatagactgcttacgcggttgaaggagaaaacgttcgttacccggctaactacttcgagaaacttagtaacaccatcgaagctgcagggtgtttcgctcagcacttcccccgtgtagatcaggccgatgagtcaccgcaatccccacgggcgaccgtggcggtggctgcgttggcggcctgcctatggggcaacccataggacgccctaaagtggacatggtgcgaagagtctattgagctagttagtagtcctccggcccctgaatgcggctaatcctaactgcggagcacataccctcaagccagagggtggtgtgtcgtaacgggtaactctgcagcggaaccgactactttgggtgtccgtgtttccttttattcttactgtggctgcttatggtgacaattcaagagttgttaccatatagctattggattggccatccggtgtctaacagagctattgtgtacttatttgttgggtacgttccattatcttacacatcccttgacacattacattttattgtgaagctaaatacaagaag

SEQ ID NO: 23719 - DNA, 647 bp, synthetic construct
  source 1..647: mol_type = other DNA
cacctcgcaacttagaagcaacgcgcatcactgatcaacagcaggcatggcgcgccagccatgtcttgatcaagcacttctgtttccccggactgagtatcaatagactgcttacgcggttgaaggagaaaacgttcgttacccggctaactacttcgagaaacttagtaacaccatcgaagctgcagggtgtttcgctcagcacttcccccgtgtagatcaggccgatgagtcaccgcaatccccacgggcgaccgtggcggtggctgcgttggcggcctgcctatggggcaacccataggacgccctaaagtggacatggtgcgaagagtctattgagctagttagtagtcctccggcccctgaatgcggctaatcctaactgcggagcacataccctcaagccagagggtggtgtgtcgtaacgggtaactctgcagcggaaccgactactttgggtgtccgtgtttccttttattcttactgtggctgcttatggtgacaattcaagagttgttaccatatagctattggattggccatccggtgtctaacagagctattgtgtacttatttgttgggtacgttccattatcttacacatcccttgacacattacattttattgtgaagctaaatacaagaag

SEQ ID NO: 23720 - DNA, 597 bp, synthetic construct
  source 1..597: mol_type = other DNA
cgcgccagccatgtcttgatcaagcacttctgtttccccggactgagtatcaatagactgcttacgcggttgaaggagaaaacgttcgttacccggctaactacttcgagaaacttagtaacaccatcgaagctgcagggtgtttcgctcagcacttcccccgtgtagatcaggccgatgagtcaccgcaatccccacgggcgaccgtggcggtggctgcgttggcggcctgcctatggggcaacccataggacgccctaaagtggacatggtgcgaagagtctattgagctagttagtagtcctccggcccctgaatgcggctaatcctaactgcggagcacataccctcaagccagagggtggtgtgtcgtaacgggtaactctgcagcggaaccgactactttgggtgtccgtgtttccttttattcttactgtggctgcttatggtgacaattcaagagttgttaccatatagctattggattggccatccggtgtctaacagagctattgtgtacttatttgttgggtacgttccattatcttacacatcccttgacacattacattttattgtgaagctaaatacaagaag

SEQ ID NO: 23721 - DNA, 547 bp, synthetic construct
  source 1..547: mol_type = other DNA
caatagactgcttacgcggttgaaggagaaaacgttcgttacccggctaactacttcgagaaacttagtaacaccatcgaagctgcagggtgtttcgctcagcacttcccccgtgtagatcaggccgatgagtcaccgcaatccccacgggcgaccgtggcggtggctgcgttggcggcctgcctatggggcaacccataggacgccctaaagtggacatggtgcgaagagtctattgagctagttagtagtcctccggcccctgaatgcggctaatcctaactgcggagcacataccctcaagccagagggtggtgtgtcgtaacgggtaactctgcagcggaaccgactactttgggtgtccgtgtttccttttattcttactgtggctgcttatggtgacaattcaagagttgttaccatatagctattggattggccatccggtgtctaacagagctattgtgtacttatttgttgggtacgttccattatcttacacatcccttgacacattacattttattgtgaagctaaatacaagaag

SEQ ID NO: 23722 - DNA, 697 bp, synthetic construct
  source 1..697: mol_type = other DNA
gcactctggtactgcggtacctttgtgcgcctgttttatctccccagacccccgcaacgtcacattagaagatagacaatacgaccaatagtcagtggggcaacccagcctcactttggtcaagtacctctgtttccccgggcttagtaccaataggctgcttgcgcggctgaaggggaacgcgcccgttatccggctaactacttcgagaaacctagtaccaccatggaagttgccgagtgtttcgctcagcacaaccccagtgtagatcaggtcgatgagtcaccgtacaccccacgggcgaccgtgacggtggctgcgttggcggcctgcccatggtgcacaccatgggacgctctaatacagacatggtgcgaagagtctattgagctagttagtagtcctccggcccctgaatgcggctaatcctaactgtggagcatgcgctctcaacccagagagtagcgtgtcgtaacgggcaactctgcagcggaaccgactactttgggtgtccgtgtttccttttattcttatattggctgcttatggtgacaattgagagattgttaccatatagctattggattggccatccggtgtgcaatagagctattgtatattcttttgttggctttgtgccattagattatactgcaattgctactttaagatacatcttgtttctgaacacagcaaa

SEQ ID NO: 23723 - DNA, 647 bp, synthetic construct
  source 1..647: mol_type = other DNA
cccgcaacgtcacattagaagatagacaatacgaccaatagtcagtggggcaacccagcctcactttggtcaagtacctctgtttccccgggcttagtaccaataggctgcttgcgcggctgaaggggaacgcgcccgttatccggctaactacttcgagaaacctagtaccaccatggaagttgccgagtgtttcgctcagcacaaccccagtgtagatcaggtcgatgagtcaccgtacaccccacgggcgaccgtgacggtggctgcgttggcggcctgcccatggtgcacaccatgggacgctctaatacagacatggtgcgaagagtctattgagctagttagtagtcctccggcccctgaatgcggctaatcctaactgtggagcatgcgctctcaacccagagagtagcgtgtcgtaacgggcaactctgcagcggaaccgactactttgggtgtccgtgtttccttttattcttatattggctgcttatggtgacaattgagagattgttaccatatagctattggattggccatccggtgtgcaatagagctattgtatattcttttgttggctttgtgccattagattatactgcaattgctactttaagatacatcttgtttctgaacacagcaaa

SEQ ID NO: 23724 - DNA, 597 bp, synthetic construct
  source 1..597: mol_type = other DNA
caacccagcctcactttggtcaagtacctctgtttccccgggcttagtaccaataggctgcttgcgcggctgaaggggaacgcgcccgttatccggctaactacttcgagaaacctagtaccaccatggaagttgccgagtgtttcgctcagcacaaccccagtgtagatcaggtcgatgagtcaccgtacaccccacgggcgaccgtgacggtggctgcgttggcggcctgcccatggtgcacaccatgggacgctctaatacagacatggtgcgaagagtctattgagctagttagtagtcctccggcccctgaatgcggctaatcctaactgtggagcatgcgctctcaacccagagagtagcgtgtcgtaacgggcaactctgcagcggaaccgactactttgggtgtccgtgtttccttttattcttatattggctgcttatggtgacaattgagagattgttaccatatagctattggattggccatccggtgtgcaatagagctattgtatattcttttgttggctttgtgccattagattatactgcaattgctactttaagatacatcttgtttctgaacacagcaaa

SEQ ID NO: 23725 - DNA, 547 bp, synthetic construct
  source 1..547: mol_type = other DNA
caataggctgcttgcgcggctgaaggggaacgcgcccgttatccggctaactacttcgagaaacctagtaccaccatggaagttgccgagtgtttcgctcagcacaaccccagtgtagatcaggtcgatgagtcaccgtacaccccacgggcgaccgtgacggtggctgcgttggcggcctgcccatggtgcacaccatgggacgctctaatacagacatggtgcgaagagtctattgagctagttagtagtcctccggcccctgaatgcggctaatcctaactgtggagcatgcgctctcaacccagagagtagcgtgtcgtaacgggcaactctgcagcggaaccgactactttgggtgtccgtgtttccttttattcttatattggctgcttatggtgacaattgagagattgttaccatatagctattggattggccatccggtgtgcaatagagctattgtatattcttttgttggctttgtgccattagattatactgcaattgctactttaagatacatcttgtttctgaacacagcaaa

SEQ ID NO: 23726 - DNA, 697 bp, synthetic construct
  source 1..697: mol_type = other DNA
gcacactggtattacggtacccttgtgcgcctgttttatcctccctggcccccgtaataatgtattagaagtcttgcaacgtgaccaatagctagtaaagcaacccagctttacttgggtcaagtacttctgttaccccggacctagtaccaataggctgctcgcgcggctgaaggggaaaacgttcgttatccggctaactacttcgggaaacccagtaccatcatgaatgttgcggagtgtttcgctcagcactaccccagtgtagatcaggccgatgagtcaccgtacaccccacgggcgaccgtgacggtggctgcgttggcggcctgcccatggcacctgccatgggacgctctaatacggacatggtgtgaagagtctactgagctagttagtagtcctccggcccctgaatgcggctaatcctaactgcggagcacgcgcccccaatccagagggtagcgtgtcgtaatgggcaactctgcagcggaaccgactactttgggtgtccgtgtttccttttattcttacactggctgcttatggtgacaattgagagattgttgccatatagctattggattggccatccggtgagcaatagagcgattatctattcttttgttggatttgtgccattagattacactgccatcatcacactgaagtacattttattgttaaacacaacaaa

SEQ ID NO: 23727 - DNA, 647 bp, synthetic construct
  source 1..647: mol_type = other DNA
cccgtaataatgtattagaagtcttgcaacgtgaccaatagctagtaaagcaacccagctttacttgggtcaagtacttctgttaccccggacctagtaccaataggctgctcgcgcggctgaaggggaaaacgttcgttatccggctaactacttcgggaaacccagtaccatcatgaatgttgcggagtgtttcgctcagcactaccccagtgtagatcaggccgatgagtcaccgtacaccccacgggcgaccgtgacggtggctgcgttggcggcctgcccatggcacctgccatgggacgctctaatacggacatggtgtgaagagtctactgagctagttagtagtcctccggcccctgaatgcggctaatcctaactgcggagcacgcgcccccaatccagagggtagcgtgtcgtaatgggcaactctgcagcggaaccgactactttgggtgtccgtgtttccttttattcttacactggctgcttatggtgacaattgagagattgttgccatatagctattggattggccatccggtgagcaatagagcgattatctattcttttgttggatttgtgccattagattacactgccatcatcacactgaagtacattttattgttaaacacaacaaa

SEQ ID NO: 23728 - DNA, 597 bp, synthetic construct
  source 1..597: mol_type = other DNA
caacccagctttacttgggtcaagtacttctgttaccccggacctagtaccaataggctgctcgcgcggctgaaggggaaaacgttcgttatccggctaactacttcgggaaacccagtaccatcatgaatgttgcggagtgtttcgctcagcactaccccagtgtagatcaggccgatgagtcaccgtacaccccacgggcgaccgtgacggtggctgcgttggcggcctgcccatggcacctgccatgggacgctctaatacggacatggtgtgaagagtctactgagctagttagtagtcctccggcccctgaatgcggctaatcctaactgcggagcacgcgcccccaatccagagggtagcgtgtcgtaatgggcaactctgcagcggaaccgactactttgggtgtccgtgtttccttttattcttacactggctgcttatggtgacaattgagagattgttgccatatagctattggattggccatccggtgagcaatagagcgattatctattcttttgttggatttgtgccattagattacactgccatcatcacactgaagtacattttattgttaaacacaacaaa

SEQ ID NO: 23729 - DNA, 547 bp, synthetic construct
  source 1..547: mol_type = other DNA
caataggctgctcgcgcggctgaaggggaaaacgttcgttatccggctaactacttcgggaaacccagtaccatcatgaatgttgcggagtgtttcgctcagcactaccccagtgtagatcaggccgatgagtcaccgtacaccccacgggcgaccgtgacggtggctgcgttggcggcctgcccatggcacctgccatgggacgctctaatacggacatggtgtgaagagtctactgagctagttagtagtcctccggcccctgaatgcggctaatcctaactgcggagcacgcgcccccaatccagagggtagcgtgtcgtaatgggcaactctgcagcggaaccgactactttgggtgtccgtgtttccttttattcttacactggctgcttatggtgacaattgagagattgttgccatatagctattggattggccatccggtgagcaatagagcgattatctattcttttgttggatttgtgccattagattacactgccatcatcacactgaagtacattttattgttaaacacaacaaa

SEQ ID NO: 23730 - DNA, 697 bp, synthetic construct
  source 1..697: mol_type = other DNA
agcactctggtaccacggtacctttgtgcgcctgttttatctccccaaaccccgtaacgctacattagaagttaaacaatatgaccgatagtcagtggggcaacccagcctcactttggtcaagcacttctgttctcccgggcttagtaccaataagctgctcgcgcggctgaaggggaacgcgcccgttatccggctaactacttcgagaaacctagtaccaccatggaagttgcagagtgtttcgctcagcactaccccagtgtagatcaggctgatgagtcaccgtgcaccccacgggcgaccgtgacggtgactgcgttggcggcctgcccatggtgtataccatgggacgctctaatacagacatggtgcgaagagtctattgagctagttagtagtcctccggcccctgaatgcggctaatcctaactgcggagcacgcgctctcaacccagagagtagcgtgtcgtaacgggtaactctgcagcggaaccgactactttgggtgtccgtgtttctttttattcttacattggctgcttatggtgacaattgagagattgttaccatatagctattggattggccatccggtgtgtaacagagctatcatatattcttttgttggcttcgtgccactagattatactgcaattgttactttaaggtacatcttacttctgaatacggtaaa

SEQ ID NO: 23731 - DNA, 647 bp, synthetic construct
  source 1..647: mol_type = other DNA
cccgtaacgctacattagaagttaaacaatatgaccgatagtcagtggggcaacccagcctcactttggtcaagcacttctgttctcccgggcttagtaccaataagctgctcgcgcggctgaaggggaacgcgcccgttatccggctaactacttcgagaaacctagtaccaccatggaagttgcagagtgtttcgctcagcactaccccagtgtagatcaggctgatgagtcaccgtgcaccccacgggcgaccgtgacggtgactgcgttggcggcctgcccatggtgtataccatgggacgctctaatacagacatggtgcgaagagtctattgagctagttagtagtcctccggcccctgaatgcggctaatcctaactgcggagcacgcgctctcaacccagagagtagcgtgtcgtaacgggtaactctgcagcggaaccgactactttgggtgtccgtgtttctttttattcttacattggctgcttatggtgacaattgagagattgttaccatatagctattggattggccatccggtgtgtaacagagctatcatatattcttttgttggcttcgtgccactagattatactgcaattgttactttaaggtacatcttacttctgaatacggtaaa

SEQ ID NO: 23732 - DNA, 597 bp, synthetic construct
  source 1..597: mol_type = other DNA
caacccagcctcactttggtcaagcacttctgttctcccgggcttagtaccaataagctgctcgcgcggctgaaggggaacgcgcccgttatccggctaactacttcgagaaacctagtaccaccatggaagttgcagagtgtttcgctcagcactaccccagtgtagatcaggctgatgagtcaccgtgcaccccacgggcgaccgtgacggtgactgcgttggcggcctgcccatggtgtataccatgggacgctctaatacagacatggtgcgaagagtctattgagctagttagtagtcctccggcccctgaatgcggctaatcctaactgcggagcacgcgctctcaacccagagagtagcgtgtcgtaacgggtaactctgcagcggaaccgactactttgggtgtccgtgtttctttttattcttacattggctgcttatggtgacaattgagagattgttaccatatagctattggattggccatccggtgtgtaacagagctatcatatattcttttgttggcttcgtgccactagattatactgcaattgttactttaaggtacatcttacttctgaatacggtaaa

SEQ ID NO: 23733 - DNA, 547 bp, synthetic construct
  source 1..547: mol_type = other DNA
caataagctgctcgcgcggctgaaggggaacgcgcccgttatccggctaactacttcgagaaacctagtaccaccatggaagttgcagagtgtttcgctcagcactaccccagtgtagatcaggctgatgagtcaccgtgcaccccacgggcgaccgtgacggtgactgcgttggcggcctgcccatggtgtataccatgggacgctctaatacagacatggtgcgaagagtctattgagctagttagtagtcctccggcccctgaatgcggctaatcctaactgcggagcacgcgctctcaacccagagagtagcgtgtcgtaacgggtaactctgcagcggaaccgactactttgggtgtccgtgtttctttttattcttacattggctgcttatggtgacaattgagagattgttaccatatagctattggattggccatccggtgtgtaacagagctatcatatattcttttgttggcttcgtgccactagattatactgcaattgttactttaaggtacatcttacttctgaatacggtaaa

SEQ ID NO: 23734 - DNA, 697 bp, synthetic construct
  source 1..697: mol_type = other DNA
gcacactgattctacggaatctttgtgcgcctgttttatatccctcccctaaaatagtaatttagacgttgaacatttacacgaccaatagtgggcgtggcgcaccagtcacgtcttggtcaagcactcctgttcccccggaccgagtatcaataggctgctcacgtggctgaaggagaaagtgttcgttatccggctaactacttcgggaaacccagtaacaccatgaaagttgcagagtgtttcgttcagcacttcccccgtgtagatcaggctgatgagtcactgcaaaccccacgggcgaccgtggcagtggctgcgttggcggcctgcctatggggtaacccataggacgctctaatacagacatggtgcgaagagtctactgagctagttagtattcctccggcccctgaatgcggctaatcctaactgcggagcacatgccctcaatccagagggtggtgtgtcgtaatgggcaactctgcagcggaaccgactactttgggtgtccgtgtttccttttattcttatactggctgcttatggtgacaattgaaaagttgttaccatatagctattggattggccatccggtgaataacagagctttggtttatcagttcattgggttcgtgcccttatcatctacagcttacacaactttggtgtacttgttatatcttaatagtaagaa

SEQ ID NO: 23735 - DNA, 647 bp, synthetic construct
  source 1..647: mol_type = other DNA
aaaatagtaatttagacgttgaacatttacacgaccaatagtgggcgtggcgcaccagtcacgtcttggtcaagcactcctgttcccccggaccgagtatcaataggctgctcacgtggctgaaggagaaagtgttcgttatccggctaactacttcgggaaacccagtaacaccatgaaagttgcagagtgtttcgttcagcacttcccccgtgtagatcaggctgatgagtcactgcaaaccccacgggcgaccgtggcagtggctgcgttggcggcctgcctatggggtaacccataggacgctctaatacagacatggtgcgaagagtctactgagctagttagtattcctccggcccctgaatgcggctaatcctaactgcggagcacatgccctcaatccagagggtggtgtgtcgtaatgggcaactctgcagcggaaccgactactttgggtgtccgtgtttccttttattcttatactggctgcttatggtgacaattgaaaagttgttaccatatagctattggattggccatccggtgaataacagagctttggtttatcagttcattgggttcgtgcccttatcatctacagcttacacaactttggtgtacttgttatatcttaatagtaagaa

SEQ ID NO: 23736 - DNA, 597 bp, synthetic construct
  source 1..597: mol_type = other DNA
cgcaccagtcacgtcttggtcaagcactcctgttcccccggaccgagtatcaataggctgctcacgtggctgaaggagaaagtgttcgttatccggctaactacttcgggaaacccagtaacaccatgaaagttgcagagtgtttcgttcagcacttcccccgtgtagatcaggctgatgagtcactgcaaaccccacgggcgaccgtggcagtggctgcgttggcggcctgcctatggggtaacccataggacgctctaatacagacatggtgcgaagagtctactgagctagttagtattcctccggcccctgaatgcggctaatcctaactgcggagcacatgccctcaatccagagggtggtgtgtcgtaatgggcaactctgcagcggaaccgactactttgggtgtccgtgtttccttttattcttatactggctgcttatggtgacaattgaaaagttgttaccatatagctattggattggccatccggtgaataacagagctttggtttatcagttcattgggttcgtgcccttatcatctacagcttacacaactttggtgtacttgttatatcttaatagtaagaa

SEQ ID NO: 23737 - DNA, 547 bp, synthetic construct
  source 1..547: mol_type = other DNA
caataggctgctcacgtggctgaaggagaaagtgttcgttatccggctaactacttcgggaaacccagtaacaccatgaaagttgcagagtgtttcgttcagcacttcccccgtgtagatcaggctgatgagtcactgcaaaccccacgggcgaccgtggcagtggctgcgttggcggcctgcctatggggtaacccataggacgctctaatacagacatggtgcgaagagtctactgagctagttagtattcctccggcccctgaatgcggctaatcctaactgcggagcacatgccctcaatccagagggtggtgtgtcgtaatgggcaactctgcagcggaaccgactactttgggtgtccgtgtttccttttattcttatactggctgcttatggtgacaattgaaaagttgttaccatatagctattggattggccatccggtgaataacagagctttggtttatcagttcattgggttcgtgcccttatcatctacagcttacacaactttggtgtacttgttatatcttaatagtaagaa

SEQ ID NO: 23738 - DNA, 697 bp, synthetic construct
  source 1..697: mol_type = other DNA
cactctggttctccggaacctttgtgcgcctgttttgaaaccccctcccccaactcgaaacgtagaagtaatgtacactactgatcagtagcaggcgtggcgcaccagccatgtctcgatcaagcacttctgtttccccggactgagtatcaatagactgctcacgcggttgaaggtgaaaacgtccgttacccggctaactacttcgagaaacctagtagcaccatagaaactgcagagtgtttcgctcagcacttcccccgtgtagatcaggtcgatgagtcactgcaatccccacgggtgaccgtggcagtggctgcgttggcggcctgcctatggggcaacccataggacgctctaaggtggacatggtgtgaagagtctattgagctagttagtagtcctccggcccctgaatgcggctaatcctaactgtggagcgcatactcccaaaccagggagcagtgcgtcgtaacgggcaactccgcagcggaaccgactactttgggtgtccgtgtttccttttattcctatactggctgcttatggtgacaattgagagattgttaccatatagctattggattggccatccagtgtgtaatagagcaatcatttaccaatttgttggatttactccattaacccacacgtctctcaacacactacatttcatcttactactgaacactagaaa

SEQ ID NO: 23739 - DNA, 647 bp, synthetic construct
  source 1..647: mol_type = other DNA
caactcgaaacgtagaagtaatgtacactactgatcagtagcaggcgtggcgcaccagccatgtctcgatcaagcacttctgtttccccggactgagtatcaatagactgctcacgcggttgaaggtgaaaacgtccgttacccggctaactacttcgagaaacctagtagcaccatagaaactgcagagtgtttcgctcagcacttcccccgtgtagatcaggtcgatgagtcactgcaatccccacgggtgaccgtggcagtggctgcgttggcggcctgcctatggggcaacccataggacgctctaaggtggacatggtgtgaagagtctattgagctagttagtagtcctccggcccctgaatgcggctaatcctaactgtggagcgcatactcccaaaccagggagcagtgcgtcgtaacgggcaactccgcagcggaaccgactactttgggtgtccgtgtttccttttattcctatactggctgcttatggtgacaattgagagattgttaccatatagctattggattggccatccagtgtgtaatagagcaatcatttaccaatttgttggatttactccattaacccacacgtctctcaacacactacatttcatcttactactgaacactagaaa

SEQ ID NO: 23740 - DNA, 597 bp, synthetic construct
  source 1..597: mol_type = other DNA
cgcaccagccatgtctcgatcaagcacttctgtttccccggactgagtatcaatagactgctcacgcggttgaaggtgaaaacgtccgttacccggctaactacttcgagaaacctagtagcaccatagaaactgcagagtgtttcgctcagcacttcccccgtgtagatcaggtcgatgagtcactgcaatccccacgggtgaccgtggcagtggctgcgttggcggcctgcctatggggcaacccataggacgctctaaggtggacatggtgtgaagagtctattgagctagttagtagtcctccggcccctgaatgcggctaatcctaactgtggagcgcatactcccaaaccagggagcagtgcgtcgtaacgggcaactccgcagcggaaccgactactttgggtgtccgtgtttccttttattcctatactggctgcttatggtgacaattgagagattgttaccatatagctattggattggccatccagtgtgtaatagagcaatcatttaccaatttgttggatttactccattaacccacacgtctctcaacacactacatttcatcttactactgaacactagaaa

SEQ ID NO: 23741 - DNA, 547 bp, synthetic construct
  source 1..547: mol_type = other DNA
caatagactgctcacgcggttgaaggtgaaaacgtccgttacccggctaactacttcgagaaacctagtagcaccatagaaactgcagagtgtttcgctcagcacttcccccgtgtagatcaggtcgatgagtcactgcaatccccacgggtgaccgtggcagtggctgcgttggcggcctgcctatggggcaacccataggacgctctaaggtggacatggtgtgaagagtctattgagctagttagtagtcctccggcccctgaatgcggctaatcctaactgtggagcgcatactcccaaaccagggagcagtgcgtcgtaacgggcaactccgcagcggaaccgactactttgggtgtccgtgtttccttttattcctatactggctgcttatggtgacaattgagagattgttaccatatagctattggattggccatccagtgtgtaatagagcaatcatttaccaatttgttggatttactccattaacccacacgtctctcaacacactacatttcatcttactactgaacactagaaa

SEQ ID NO: 23742 - DNA, 697 bp, synthetic construct
  source 1..697: mol_type = other DNA
gtacaccggtattacggtacccttgtacgcctgttttatactccctacccctgcaacttagaagcaaataatccaagttcaatagtagggggtacaaaccagtaccaccacgaacaagcacttctgtttccccggtgatgttgtatagactgtacccacggttgaaaacaattgatccgttacccgctcttgtacttcgagaagcctagtatcatcttggaaccttcgatgcgttgcgctcagcactcaaccccagagtgtagcttgggtcgatgagtctggacaatccacaccggcgacggtggtccaggctgcgttggcggcctacctgtggcccaaagccacaggacgctagttgtgaacaaggtgtgaagagcctattgagctacaagagagtcctccggcccctgaatgcggctaatcccaaccacggagcaggtgatcacaacccagtgattagcctgtcgtaatgcgtaagtctgtggcggaaccgactactttgggtgaccgtgtttccttttatttttattgtggctgcttatggtgacaatcttagattgttatcataaagcgatttggattggccatccggtgaaagttaaacacattatttacttgtttgttggattcactccgttgtcctctcgcactacgtatattattaacgctgtgctattaattaggtcaatacatcaca

SEQ ID NO: 23743 - DNA, 647 bp, synthetic construct
  source 1..647: mol_type = other DNA
ctgcaacttagaagcaaataatccaagttcaatagtagggggtacaaaccagtaccaccacgaacaagcacttctgtttccccggtgatgttgtatagactgtacccacggttgaaaacaattgatccgttacccgctcttgtacttcgagaagcctagtatcatcttggaaccttcgatgcgttgcgctcagcactcaaccccagagtgtagcttgggtcgatgagtctggacaatccacaccggcgacggtggtccaggctgcgttggcggcctacctgtggcccaaagccacaggacgctagttgtgaacaaggtgtgaagagcctattgagctacaagagagtcctccggcccctgaatgcggctaatcccaaccacggagcaggtgatcacaacccagtgattagcctgtcgtaatgcgtaagtctgtggcggaaccgactactttgggtgaccgtgtttccttttatttttattgtggctgcttatggtgacaatcttagattgttatcataaagcgatttggattggccatccggtgaaagttaaacacattatttacttgtttgttggattcactccgttgtcctctcgcactacgtatattattaacgctgtgctattaattaggtcaatacatcaca

SEQ ID NO: 23744 - DNA, 597 bp, synthetic construct
  source 1..597: mol_type = other DNA
agtaccaccacgaacaagcacttctgtttccccggtgatgttgtatagactgtacccacggttgaaaacaattgatccgttacccgctcttgtacttcgagaagcctagtatcatcttggaaccttcgatgcgttgcgctcagcactcaaccccagagtgtagcttgggtcgatgagtctggacaatccacaccggcgacggtggtccaggctgcgttggcggcctacctgtggcccaaagccacaggacgctagttgtgaacaaggtgtgaagagcctattgagctacaagagagtcctccggcccctgaatgcggctaatcccaaccacggagcaggtgatcacaacccagtgattagcctgtcgtaatgcgtaagtctgtggcggaaccgactactttgggtgaccgtgtttccttttatttttattgtggctgcttatggtgacaatcttagattgttatcataaagcgatttggattggccatccggtgaaagttaaacacattatttacttgtttgttggattcactccgttgtcctctcgcactacgtatattattaacgctgtgctattaattaggtcaatacatcaca

SEQ ID NO: 23745 - DNA, 547 bp, synthetic construct
  source 1..547: mol_type = other DNA
tgtacccacggttgaaaacaattgatccgttacccgctcttgtacttcgagaagcctagtatcatcttggaaccttcgatgcgttgcgctcagcactcaaccccagagtgtagcttgggtcgatgagtctggacaatccacaccggcgacggtggtccaggctgcgttggcggcctacctgtggcccaaagccacaggacgctagttgtgaacaaggtgtgaagagcctattgagctacaagagagtcctccggcccctgaatgcggctaatcccaaccacggagcaggtgatcacaacccagtgattagcctgtcgtaatgcgtaagtctgtggcggaaccgactactttgggtgaccgtgtttccttttatttttattgtggctgcttatggtgacaatcttagattgttatcataaagcgatttggattggccatccggtgaaagttaaacacattatttacttgtttgttggattcactccgttgtcctctcgcactacgtatattattaacgctgtgctattaattaggtcaatacatcaca

SEQ ID NO: 23746 - DNA, 697 bp, synthetic construct
  source 1..697: mol_type = other DNA
gtacaccggtattacggtacccttgtacgcctgttttatacttccttcccccgtaacttagaagtttacaaaccaagttcaatagaagggggtacaaaccagtaccaccacgaacaagcacttctgtttccccggtgagtttgcatagactgtatccacggttgaaagtgaacgatccgttacccgctcttgtacttcgagaagcctagtaaccccttggaatcttcgatgcgttgcgctcagcactcaaacccagagtgtagcttaggtcgatgagtctggacactcctcaccggtgacggtggtccaggctgcgttggcggcctacctgtggtccaaagccacaggacgctagttgtgaacaaggtgtgaagagcctattgagctacttgagagtcctccggcccctgaatgcggctaatcctaaccatggatcaggtggtcacaatccagtgactggcctgtcgtaatgcgcaagtccgtggcggaaccgactactttgggtgtccgtgtttccttttattcttataatggctgcttatggtgacaatcatagattgttatcatatagcgaattggattggccatccggtgtgaacaaaacacttgattcacttgttggttgaatttgtttcattaattgaacacataccagagctcatttgattggcatttttgcttagacaattgtaccaca

SEQ ID NO: 23747 - DNA, 647 bp, synthetic construct
  source 1..647: mol_type = other DNA
ccgtaacttagaagtttacaaaccaagttcaatagaagggggtacaaaccagtaccaccacgaacaagcacttctgtttccccggtgagtttgcatagactgtatccacggttgaaagtgaacgatccgttacccgctcttgtacttcgagaagcctagtaaccccttggaatcttcgatgcgttgcgctcagcactcaaacccagagtgtagcttaggtcgatgagtctggacactcctcaccggtgacggtggtccaggctgcgttggcggcctacctgtggtccaaagccacaggacgctagttgtgaacaaggtgtgaagagcctattgagctacttgagagtcctccggcccctgaatgcggctaatcctaaccatggatcaggtggtcacaatccagtgactggcctgtcgtaatgcgcaagtccgtggcggaaccgactactttgggtgtccgtgtttccttttattcttataatggctgcttatggtgacaatcatagattgttatcatatagcgaattggattggccatccggtgtgaacaaaacacttgattcacttgttggttgaatttgtttcattaattgaacacataccagagctcatttgattggcatttttgcttagacaattgtaccaca

SEQ ID NO: 23748 - DNA, 597 bp, synthetic construct
  source 1..597: mol_type = other DNA
agtaccaccacgaacaagcacttctgtttccccggtgagtttgcatagactgtatccacggttgaaagtgaacgatccgttacccgctcttgtacttcgagaagcctagtaaccccttggaatcttcgatgcgttgcgctcagcactcaaacccagagtgtagcttaggtcgatgagtctggacactcctcaccggtgacggtggtccaggctgcgttggcggcctacctgtggtccaaagccacaggacgctagttgtgaacaaggtgtgaagagcctattgagctacttgagagtcctccggcccctgaatgcggctaatcctaaccatggatcaggtggtcacaatccagtgactggcctgtcgtaatgcgcaagtccgtggcggaaccgactactttgggtgtccgtgtttccttttattcttataatggctgcttatggtgacaatcatagattgttatcatatagcgaattggattggccatccggtgtgaacaaaacacttgattcacttgttggttgaatttgtttcattaattgaacacataccagagctcatttgattggcatttttgcttagacaattgtaccaca

SEQ ID NO: 23749 - DNA, 547 bp, synthetic construct
  source 1..547: mol_type = other DNA
tgtatccacggttgaaagtgaacgatccgttacccgctcttgtacttcgagaagcctagtaaccccttggaatcttcgatgcgttgcgctcagcactcaaacccagagtgtagcttaggtcgatgagtctggacactcctcaccggtgacggtggtccaggctgcgttggcggcctacctgtggtccaaagccacaggacgctagttgtgaacaaggtgtgaagagcctattgagctacttgagagtcctccggcccctgaatgcggctaatcctaaccatggatcaggtggtcacaatccagtgactggcctgtcgtaatgcgcaagtccgtggcggaaccgactactttgggtgtccgtgtttccttttattcttataatggctgcttatggtgacaatcatagattgttatcatatagcgaattggattggccatccggtgtgaacaaaacacttgattcacttgttggttgaatttgtttcattaattgaacacataccagagctcatttgattggcatttttgcttagacaattgtaccaca

SEQ ID NO: 23750 - DNA, 697 bp, synthetic construct
  source 1..697: mol_type = other DNA
gtacaccggtatcacggtacccttgtacgcctgttttatactcccttcccccagtaacttagaagtaataaaccaagttcaatagaagggggtacaaaccagtaccaccatgaacaagcacttctgttcccccggtgaggttgtatagactgtgcccacggttgaaagcgaccgatccgttatccgctcttgtacttcgagaagcctagtatcaccttggaatcttcgatgcattgcgttcagcacttgatcccggagtgtagcttaggccgatgagtctggacgttccccaccggtgacggtggtccaggctgcgttggcggcctacctgtggtccaaagccacaggacgctagttgtgaacaaggtgtgaagagcctattgagctacatgagagtcctccggcccctgaatgcggctaatcccaaccacggagcagatggttgcaatccagcggctagtctgtcgtaacgcgcaagtctgtggcggaaccgactactttgggtgtccgtgtttccttttatctttataatggctgcttatggtgacaatcattgattgttgccataaagcgacttggattggccatccggtgaaaatcagatcgattatctacttgtttattggattcacacccttatctatatacacgctaagtttgatcagagtcaccttgttaattagatattattaccacg

SEQ ID NO: 23751 - DNA, 647 bp, synthetic construct
  source 1..647: mol_type = other DNA
ccagtaacttagaagtaataaaccaagttcaatagaagggggtacaaaccagtaccaccatgaacaagcacttctgttcccccggtgaggttgtatagactgtgcccacggttgaaagcgaccgatccgttatccgctcttgtacttcgagaagcctagtatcaccttggaatcttcgatgcattgcgttcagcacttgatcccggagtgtagcttaggccgatgagtctggacgttccccaccggtgacggtggtccaggctgcgttggcggcctacctgtggtccaaagccacaggacgctagttgtgaacaaggtgtgaagagcctattgagctacatgagagtcctccggcccctgaatgcggctaatcccaaccacggagcagatggttgcaatccagcggctagtctgtcgtaacgcgcaagtctgtggcggaaccgactactttgggtgtccgtgtttccttttatctttataatggctgcttatggtgacaatcattgattgttgccataaagcgacttggattggccatccggtgaaaatcagatcgattatctacttgtttattggattcacacccttatctatatacacgctaagtttgatcagagtcaccttgttaattagatattattaccacg

SEQ ID NO: 23752 - DNA, 597 bp, synthetic construct
  source 1..597: mol_type = other DNA
agtaccaccatgaacaagcacttctgttcccccggtgaggttgtatagactgtgcccacggttgaaagcgaccgatccgttatccgctcttgtacttcgagaagcctagtatcaccttggaatcttcgatgcattgcgttcagcacttgatcccggagtgtagcttaggccgatgagtctggacgttccccaccggtgacggtggtccaggctgcgttggcggcctacctgtggtccaaagccacaggacgctagttgtgaacaaggtgtgaagagcctattgagctacatgagagtcctccggcccctgaatgcggctaatcccaaccacggagcagatggttgcaatccagcggctagtctgtcgtaacgcgcaagtctgtggcggaaccgactactttgggtgtccgtgtttccttttatctttataatggctgcttatggtgacaatcattgattgttgccataaagcgacttggattggccatccggtgaaaatcagatcgattatctacttgtttattggattcacacccttatctatatacacgctaagtttgatcagagtcaccttgttaattagatattattaccacg

SEQ ID NO: 23753 - DNA, 547 bp, synthetic construct
  source 1..547: mol_type = other DNA
tgtgcccacggttgaaagcgaccgatccgttatccgctcttgtacttcgagaagcctagtatcaccttggaatcttcgatgcattgcgttcagcacttgatcccggagtgtagcttaggccgatgagtctggacgttccccaccggtgacggtggtccaggctgcgttggcggcctacctgtggtccaaagccacaggacgctagttgtgaacaaggtgtgaagagcctattgagctacatgagagtcctccggcccctgaatgcggctaatcccaaccacggagcagatggttgcaatccagcggctagtctgtcgtaacgcgcaagtctgtggcggaaccgactactttgggtgtccgtgtttccttttatctttataatggctgcttatggtgacaatcattgattgttgccataaagcgacttggattggccatccggtgaaaatcagatcgattatctacttgtttattggattcacacccttatctatatacacgctaagtttgatcagagtcaccttgttaattagatattattaccacg

SEQ ID NO: 23754 - DNA, 697 bp, synthetic construct
  source 1..697: mol_type = other DNA
gtacactggtattacggtacctttgtacgcctgttttatgctcccttcccctgcaacttagaagattacaaaccaagttcaatagaagggggtgcaaaccagtaccaccacgaacaagcacttctgtttccccggtgaacttgtatagactgtacccacggtcgaaaacgagtgatccgttatccgctcttgtacttcgagaagcccagtaccttcttgggatcattgatgcgttgcgctcagcactcgaccccggagtgtagcttaggctgatgagtctggacatccctcaccggcgacggtggtccaggctgcgttggcggcctacctgtggtccaaagccacaggacgctaaatgtgaacaaggtgtgaagagcctattgagctacatgagagtcctccggcccctgaatgcggctaatcctaaccacggagcaggtggttgcaaaccagcaattggcctgtcgtaatgcgtaagtctgtggcggaaccgactactttgggtgtccgtgtttctctttatttttacaatggctgcttatggtgacaatcttagattgttgtcataaagcgaattggattggccatccggtgaagataaagcatatcatttatctatttattggattcactccattaaactcttggacttatcatttaatacaagtagtgttattgataagaagtgttcaccaca

SEQ ID NO: 23755 - DNA, 647 bp, synthetic construct
  source 1..647: mol_type = other DNA
ctgcaacttagaagattacaaaccaagttcaatagaagggggtgcaaaccagtaccaccacgaacaagcacttctgtttccccggtgaacttgtatagactgtacccacggtcgaaaacgagtgatccgttatccgctcttgtacttcgagaagcccagtaccttcttgggatcattgatgcgttgcgctcagcactcgaccccggagtgtagcttaggctgatgagtctggacatccctcaccggcgacggtggtccaggctgcgttggcggcctacctgtggtccaaagccacaggacgctaaatgtgaacaaggtgtgaagagcctattgagctacatgagagtcctccggcccctgaatgcggctaatcctaaccacggagcaggtggttgcaaaccagcaattggcctgtcgtaatgcgtaagtctgtggcggaaccgactactttgggtgtccgtgtttctctttatttttacaatggctgcttatggtgacaatcttagattgttgtcataaagcgaattggattggccatccggtgaagataaagcatatcatttatctatttattggattcactccattaaactcttggacttatcatttaatacaagtagtgttattgataagaagtgttcaccaca

SEQ ID NO: 23756 - DNA, 597 bp, synthetic construct
  source 1..597: mol_type = other DNA
agtaccaccacgaacaagcacttctgtttccccggtgaacttgtatagactgtacccacggtcgaaaacgagtgatccgttatccgctcttgtacttcgagaagcccagtaccttcttgggatcattgatgcgttgcgctcagcactcgaccccggagtgtagcttaggctgatgagtctggacatccctcaccggcgacggtggtccaggctgcgttggcggcctacctgtggtccaaagccacaggacgctaaatgtgaacaaggtgtgaagagcctattgagctacatgagagtcctccggcccctgaatgcggctaatcctaaccacggagcaggtggttgcaaaccagcaattggcctgtcgtaatgcgtaagtctgtggcggaaccgactactttgggtgtccgtgtttctctttatttttacaatggctgcttatggtgacaatcttagattgttgtcataaagcgaattggattggccatccggtgaagataaagcatatcatttatctatttattggattcactccattaaactcttggacttatcatttaatacaagtagtgttattgataagaagtgttcaccaca

SEQ ID NO: 23757 - DNA, 547 bp, synthetic construct
  source 1..547: mol_type = other DNA
tgtacccacggtcgaaaacgagtgatccgttatccgctcttgtacttcgagaagcccagtaccttcttgggatcattgatgcgttgcgctcagcactcgaccccggagtgtagcttaggctgatgagtctggacatccctcaccggcgacggtggtccaggctgcgttggcggcctacctgtggtccaaagccacaggacgctaaatgtgaacaaggtgtgaagagcctattgagctacatgagagtcctccggcccctgaatgcggctaatcctaaccacggagcaggtggttgcaaaccagcaattggcctgtcgtaatgcgtaagtctgtggcggaaccgactactttgggtgtccgtgtttctctttatttttacaatggctgcttatggtgacaatcttagattgttgtcataaagcgaattggattggccatccggtgaagataaagcatatcatttatctatttattggattcactccattaaactcttggacttatcatttaatacaagtagtgttattgataagaagtgttcaccaca

SEQ ID NO: 23758 - DNA, 697 bp, synthetic construct
  source 1..697: mol_type = other DNA
gtactccggtattacggtacccttgtacgcctgttttatacccccttcccccagaaacttagacgctatgaaaccaagttcaataggagggggcacgaaccagtgtcaccacgaacaagcacttctgtttccccggtgattttacataagctgtacccacggctgaaagtgaatgatccgttatccgcttgggtacttcgagaagcctagtaccacctttggatcttcgatgcgttgcgctcagcactctaccccgagtgtagcttaggtcgatgagtctgggcataccccaccggtgacggtggcccaggctgcgttggcggcctacccatggttaacaccatgggacgctagttgtgaacaaggtgtgaagagcctattgagctactcaagagtcctccggcccctgaatgcggctaatcctaaccatggagcaggtgctttcaatccagaaagtggcctgtcgtaatgcgtaagtccgtggcggaaccgactactttgggtgtccgtgtttccttttttacttttgtatggctgtttatggtgacaatcatagattgttatcataaagcgaattggattggccatccggtaaaaattaaacacatcatttatctatttgttggattcgctccaatcacttctaaaacacttcagttgatacgtgtagtattaataatcaggctattgtatcaca

SEQ ID NO: 23759 - DNA, 647 bp, synthetic construct
  source 1..647: mol_type = other DNA
ccagaaacttagacgctatgaaaccaagttcaataggagggggcacgaaccagtgtcaccacgaacaagcacttctgtttccccggtgattttacataagctgtacccacggctgaaagtgaatgatccgttatccgcttgggtacttcgagaagcctagtaccacctttggatcttcgatgcgttgcgctcagcactctaccccgagtgtagcttaggtcgatgagtctgggcataccccaccggtgacggtggcccaggctgcgttggcggcctacccatggttaacaccatgggacgctagttgtgaacaaggtgtgaagagcctattgagctactcaagagtcctccggcccctgaatgcggctaatcctaaccatggagcaggtgctttcaatccagaaagtggcctgtcgtaatgcgtaagtccgtggcggaaccgactactttgggtgtccgtgtttccttttttacttttgtatggctgtttatggtgacaatcatagattgttatcataaagcgaattggattggccatccggtaaaaattaaacacatcatttatctatttgttggattcgctccaatcacttctaaaacacttcagttgatacgtgtagtattaataatcaggctattgtatcaca

SEQ ID NO: 23760 - DNA, 597 bp, synthetic construct
  source 1..597: mol_type = other DNA
cagtgtcaccacgaacaagcacttctgtttccccggtgattttacataagctgtacccacggctgaaagtgaatgatccgttatccgcttgggtacttcgagaagcctagtaccacctttggatcttcgatgcgttgcgctcagcactctaccccgagtgtagcttaggtcgatgagtctgggcataccccaccggtgacggtggcccaggctgcgttggcggcctacccatggttaacaccatgggacgctagttgtgaacaaggtgtgaagagcctattgagctactcaagagtcctccggcccctgaatgcggctaatcctaaccatggagcaggtgctttcaatccagaaagtggcctgtcgtaatgcgtaagtccgtggcggaaccgactactttgggtgtccgtgtttccttttttacttttgtatggctgtttatggtgacaatcatagattgttatcataaagcgaattggattggccatccggtaaaaattaaacacatcatttatctatttgttggattcgctccaatcacttctaaaacacttcagttgatacgtgtagtattaataatcaggctattgtatcaca

SEQ ID NO: 23761 - DNA, 547 bp, synthetic construct
  source 1..547: mol_type = other DNA
ctgtacccacggctgaaagtgaatgatccgttatccgcttgggtacttcgagaagcctagtaccacctttggatcttcgatgcgttgcgctcagcactctaccccgagtgtagcttaggtcgatgagtctgggcataccccaccggtgacggtggcccaggctgcgttggcggcctacccatggttaacaccatgggacgctagttgtgaacaaggtgtgaagagcctattgagctactcaagagtcctccggcccctgaatgcggctaatcctaaccatggagcaggtgctttcaatccagaaagtggcctgtcgtaatgcgtaagtccgtggcggaaccgactactttgggtgtccgtgtttccttttttacttttgtatggctgtttatggtgacaatcatagattgttatcataaagcgaattggattggccatccggtaaaaattaaacacatcatttatctatttgttggattcgctccaatcacttctaaaacacttcagttgatacgtgtagtattaataatcaggctattgtatcaca

SEQ ID NO: 23762 - DNA, 697 bp, synthetic construct
  source 1..697: mol_type = other DNA
gtactccggtattgcggtacccttgtacgcctgttttatactcccttcccccgtaacttagaagcaatcaaacaaagttcaatagaagggggtacaaaccagtaccaccacgaacaagcacttctgtttccccggtgaagttgtatagactgtacccacggttaaaagcaattgatccgttacccgctcttgtacttcgagaagcctagtactaccttggaatcttcgatgcgttgcgctcaacactcaaccccagagtgtagcttgggctgatgagtctggacgttccccaccggcgacggtggtccaggctgcgttggcggcctacctgtggcccaaagccacaggacgctagttgtgaacaaggtgcgaagagcctattgagctacaagagagtcctccggcccctgaatgcggctaatcccaaccacggagcaggtagttgcaagccagcaatcgacctgtcgtaacgcgtaagtctgtggcggaaccgactactttgggtgtccgtgtttccttttaattttaaactggctgcttatggtgacaatcattgattgttatcataaagcgaattggattggccatccggtgagaatcagatccattatctacttgttcattggatttactccattgacaacatacacatacgaccttattagagtcaatttactattgagacatctccaccata

SEQ ID NO: 23763 - DNA, 647 bp, synthetic construct
  source 1..647: mol_type = other DNA
ccgtaacttagaagcaatcaaacaaagttcaatagaagggggtacaaaccagtaccaccacgaacaagcacttctgtttccccggtgaagttgtatagactgtacccacggttaaaagcaattgatccgttacccgctcttgtacttcgagaagcctagtactaccttggaatcttcgatgcgttgcgctcaacactcaaccccagagtgtagcttgggctgatgagtctggacgttccccaccggcgacggtggtccaggctgcgttggcggcctacctgtggcccaaagccacaggacgctagttgtgaacaaggtgcgaagagcctattgagctacaagagagtcctccggcccctgaatgcggctaatcccaaccacggagcaggtagttgcaagccagcaatcgacctgtcgtaacgcgtaagtctgtggcggaaccgactactttgggtgtccgtgtttccttttaattttaaactggctgcttatggtgacaatcattgattgttatcataaagcgaattggattggccatccggtgagaatcagatccattatctacttgttcattggatttactccattgacaacatacacatacgaccttattagagtcaatttactattgagacatctccaccata

SEQ ID NO: 23764 - DNA, 597 bp, synthetic construct
  source 1..597: mol_type = other DNA
agtaccaccacgaacaagcacttctgtttccccggtgaagttgtatagactgtacccacggttaaaagcaattgatccgttacccgctcttgtacttcgagaagcctagtactaccttggaatcttcgatgcgttgcgctcaacactcaaccccagagtgtagcttgggctgatgagtctggacgttccccaccggcgacggtggtccaggctgcgttggcggcctacctgtggcccaaagccacaggacgctagttgtgaacaaggtgcgaagagcctattgagctacaagagagtcctccggcccctgaatgcggctaatcccaaccacggagcaggtagttgcaagccagcaatcgacctgtcgtaacgcgtaagtctgtggcggaaccgactactttgggtgtccgtgtttccttttaattttaaactggctgcttatggtgacaatcattgattgttatcataaagcgaattggattggccatccggtgagaatcagatccattatctacttgttcattggatttactccattgacaacatacacatacgaccttattagagtcaatttactattgagacatctccaccata

SEQ ID NO: 23765 - DNA, 547 bp, synthetic construct
  source 1..547: mol_type = other DNA
tgtacccacggttaaaagcaattgatccgttacccgctcttgtacttcgagaagcctagtactaccttggaatcttcgatgcgttgcgctcaacactcaaccccagagtgtagcttgggctgatgagtctggacgttccccaccggcgacggtggtccaggctgcgttggcggcctacctgtggcccaaagccacaggacgctagttgtgaacaaggtgcgaagagcctattgagctacaagagagtcctccggcccctgaatgcggctaatcccaaccacggagcaggtagttgcaagccagcaatcgacctgtcgtaacgcgtaagtctgtggcggaaccgactactttgggtgtccgtgtttccttttaattttaaactggctgcttatggtgacaatcattgattgttatcataaagcgaattggattggccatccggtgagaatcagatccattatctacttgttcattggatttactccattgacaacatacacatacgaccttattagagtcaatttactattgagacatctccaccata

SEQ ID NO: 23766 - DNA, 697 bp, synthetic construct
  source 1..697: mol_type = other DNA
gtacactggtatcacggtacccttgtacgcctgttttatactcccttcccccgtaacttagaagccataaatccaagttcaacagaagggggcacaaaccagtgccaccacgaacaagcacttctgtctccccggtgaagttgcatagactgtaaccacggttaaaagcgattgatccgttatccgctcatgtacttcgagaagcctagtaccaccttggaaccttcgacgcgttgcgctcagcactcaaacccagagtgtagcttaggccgatgagtctggacgttccccaccggcgacggtggtccaggctgcgttggcggcctacctgtggctcaaagccacaggacgctagttgcgaacagggtgtgaagagcctattgagctacatgagattcctccggcccctgaatgcggctaatcctaaccgcggagcaggtagttgcaagccagcaactggcctgtcgtaacgcgtaagtctgcggcggaaccgactactttgggtgtccgtgtttcctttatttcttataatggctgcttatggtgacaatcatagattgttatcataaagcgaattggattggccatccagtgaaagtcagactgattatccttctgtttgttgggtttgttccactcaattcacacactttgcacttaatcagaattgtcttattgacacgacaatatcatcact

SEQ ID NO: 23767 - DNA, 647 bp, synthetic construct
  source 1..647: mol_type = other DNA
ccgtaacttagaagccataaatccaagttcaacagaagggggcacaaaccagtgccaccacgaacaagcacttctgtctccccggtgaagttgcatagactgtaaccacggttaaaagcgattgatccgttatccgctcatgtacttcgagaagcctagtaccaccttggaaccttcgacgcgttgcgctcagcactcaaacccagagtgtagcttaggccgatgagtctggacgttccccaccggcgacggtggtccaggctgcgttggcggcctacctgtggctcaaagccacaggacgctagttgcgaacagggtgtgaagagcctattgagctacatgagattcctccggcccctgaatgcggctaatcctaaccgcggagcaggtagttgcaagccagcaactggcctgtcgtaacgcgtaagtctgcggcggaaccgactactttgggtgtccgtgtttcctttatttcttataatggctgcttatggtgacaatcatagattgttatcataaagcgaattggattggccatccagtgaaagtcagactgattatccttctgtttgttgggtttgttccactcaattcacacactttgcacttaatcagaattgtcttattgacacgacaatatcatcact

SEQ ID NO: 23768 - DNA, 597 bp, synthetic construct
  source 1..597: mol_type = other DNA
agtgccaccacgaacaagcacttctgtctccccggtgaagttgcatagactgtaaccacggttaaaagcgattgatccgttatccgctcatgtacttcgagaagcctagtaccaccttggaaccttcgacgcgttgcgctcagcactcaaacccagagtgtagcttaggccgatgagtctggacgttccccaccggcgacggtggtccaggctgcgttggcggcctacctgtggctcaaagccacaggacgctagttgcgaacagggtgtgaagagcctattgagctacatgagattcctccggcccctgaatgcggctaatcctaaccgcggagcaggtagttgcaagccagcaactggcctgtcgtaacgcgtaagtctgcggcggaaccgactactttgggtgtccgtgtttcctttatttcttataatggctgcttatggtgacaatcatagattgttatcataaagcgaattggattggccatccagtgaaagtcagactgattatccttctgtttgttgggtttgttccactcaattcacacactttgcacttaatcagaattgtcttattgacacgacaatatcatcact

SEQ ID NO: 23769 - DNA, 547 bp, synthetic construct
  source 1..547: mol_type = other DNA
tgtaaccacggttaaaagcgattgatccgttatccgctcatgtacttcgagaagcctagtaccaccttggaaccttcgacgcgttgcgctcagcactcaaacccagagtgtagcttaggccgatgagtctggacgttccccaccggcgacggtggtccaggctgcgttggcggcctacctgtggctcaaagccacaggacgctagttgcgaacagggtgtgaagagcctattgagctacatgagattcctccggcccctgaatgcggctaatcctaaccgcggagcaggtagttgcaagccagcaactggcctgtcgtaacgcgtaagtctgcggcggaaccgactactttgggtgtccgtgtttcctttatttcttataatggctgcttatggtgacaatcatagattgttatcataaagcgaattggattggccatccagtgaaagtcagactgattatccttctgtttgttgggtttgttccactcaattcacacactttgcacttaatcagaattgtcttattgacacgacaatatcatcact

SEQ ID NO: 23770 - DNA, 697 bp, synthetic construct
  source 1..697: mol_type = other DNA
gtactctggtattacggtacctttgtacgcctgttttatactcccttcccctgtaacttagaagcaatctaacctagttcaataggagggggtacaaaccagtaccactacgaacaagcacttctgttaccccggtgaagttgtatagactgtgcccacggtcgaaaatgactgatccgttatccgctcatgtacttcgggaagcctagtaccatcttcggatcttcgatgcgttgcgctcagcactcgaccccagagtgtagcttaggtcgatgagtctggacaatcctcactggcgacagtggtccaggctgcgttggcggcctacctgtggtccaaagccacaggacgctagttgtgaacaaggtgtgaagagcctactgagctacttgagagtcctccggcccctgaatgcggctaatcccaaccacggagcaagtagttgcaaaccagcaaccagcttgtcgtaacgcgtaagtctgtggcggaaccgactactttgggtgtccgtgtttccttttatttttacactggctgcttatggtgacaatcatagattgttatcataaggcgaattggattggccacccggtgtaagtcagatcaattgtctactcgtttgttggatatactccaataacgcactacactcttgagcttaacagagttgttctgctggcgagaagttgctatcgca

SEQ ID NO: 23771 - DNA, 647 bp, synthetic construct
  source 1..647: mol_type = other DNA
ctgtaacttagaagcaatctaacctagttcaataggagggggtacaaaccagtaccactacgaacaagcacttctgttaccccggtgaagttgtatagactgtgcccacggtcgaaaatgactgatccgttatccgctcatgtacttcgggaagcctagtaccatcttcggatcttcgatgcgttgcgctcagcactcgaccccagagtgtagcttaggtcgatgagtctggacaatcctcactggcgacagtggtccaggctgcgttggcggcctacctgtggtccaaagccacaggacgctagttgtgaacaaggtgtgaagagcctactgagctacttgagagtcctccggcccctgaatgcggctaatcccaaccacggagcaagtagttgcaaaccagcaaccagcttgtcgtaacgcgtaagtctgtggcggaaccgactactttgggtgtccgtgtttccttttatttttacactggctgcttatggtgacaatcatagattgttatcataaggcgaattggattggccacccggtgtaagtcagatcaattgtctactcgtttgttggatatactccaataacgcactacactcttgagcttaacagagttgttctgctggcgagaagttgctatcgca

SEQ ID NO: 23772 - DNA, 597 bp, synthetic construct
  source 1..597: mol_type = other DNA
agtaccactacgaacaagcacttctgttaccccggtgaagttgtatagactgtgcccacggtcgaaaatgactgatccgttatccgctcatgtacttcgggaagcctagtaccatcttcggatcttcgatgcgttgcgctcagcactcgaccccagagtgtagcttaggtcgatgagtctggacaatcctcactggcgacagtggtccaggctgcgttggcggcctacctgtggtccaaagccacaggacgctagttgtgaacaaggtgtgaagagcctactgagctacttgagagtcctccggcccctgaatgcggctaatcccaaccacggagcaagtagttgcaaaccagcaaccagcttgtcgtaacgcgtaagtctgtggcggaaccgactactttgggtgtccgtgtttccttttatttttacactggctgcttatggtgacaatcatagattgttatcataaggcgaattggattggccacccggtgtaagtcagatcaattgtctactcgtttgttggatatactccaataacgcactacactcttgagcttaacagagttgttctgctggcgagaagttgctatcgca

SEQ ID NO: 23773 - DNA, 547 bp, synthetic construct
  source 1..547: mol_type = other DNA
tgtgcccacggtcgaaaatgactgatccgttatccgctcatgtacttcgggaagcctagtaccatcttcggatcttcgatgcgttgcgctcagcactcgaccccagagtgtagcttaggtcgatgagtctggacaatcctcactggcgacagtggtccaggctgcgttggcggcctacctgtggtccaaagccacaggacgctagttgtgaacaaggtgtgaagagcctactgagctacttgagagtcctccggcccctgaatgcggctaatcccaaccacggagcaagtagttgcaaaccagcaaccagcttgtcgtaacgcgtaagtctgtggcggaaccgactactttgggtgtccgtgtttccttttatttttacactggctgcttatggtgacaatcatagattgttatcataaggcgaattggattggccacccggtgtaagtcagatcaattgtctactcgtttgttggatatactccaataacgcactacactcttgagcttaacagagttgttctgctggcgagaagttgctatcgca

SEQ ID NO: 23774 - DNA, 697 bp, synthetic construct
  source 1..697: mol_type = other DNA
ctagtactctggtatcgcggtacctttgtacgcctgttttatacccctaccccatgtaactttagaagcagttcaacaagttcaatagggggggtgcaaaccagcaccaccacgaacaagcacttctgtaaccccggtgaccttgtataagctgtacccacggctgaaagcgagtgatccgttatccgcttaagtacttcgagaagcctagtatcaccttagaatcttcgatgcgttgcgctcagcactctatcccgagtgtagcttaggctgatgagtctgggcgttcctcaccggcgacggtggcccaggctgcgttggcggcctacccatggctaacgccatgggacgctagatgtgaacaaggtgtgaagagcctattgagctacttaagagtcctccggcccctgaatgcggctaatcccaaccacggagcaggtgccttcaacccagagggtggcctgtcgtaacgcgcaagtctgtggcggaaccgactactttgggtgtccgtgtttccttttatcttttatatggctgcttatggtgacaatcatagattgttatcataaagcgacttggattggccatccggtaaaatacaaacacatcatttacttgtttgttggatttactccactctcccaatttactcctagcataatatccattgttttgttaacaagacattactatcaca

SEQ ID NO: 23775 - DNA, 647 bp, synthetic construct
  source 1..647: mol_type = other DNA
cccatgtaactttagaagcagttcaacaagttcaatagggggggtgcaaaccagcaccaccacgaacaagcacttctgtaaccccggtgaccttgtataagctgtacccacggctgaaagcgagtgatccgttatccgcttaagtacttcgagaagcctagtatcaccttagaatcttcgatgcgttgcgctcagcactctatcccgagtgtagcttaggctgatgagtctgggcgttcctcaccggcgacggtggcccaggctgcgttggcggcctacccatggctaacgccatgggacgctagatgtgaacaaggtgtgaagagcctattgagctacttaagagtcctccggcccctgaatgcggctaatcccaaccacggagcaggtgccttcaacccagagggtggcctgtcgtaacgcgcaagtctgtggcggaaccgactactttgggtgtccgtgtttccttttatcttttatatggctgcttatggtgacaatcatagattgttatcataaagcgacttggattggccatccggtaaaatacaaacacatcatttacttgtttgttggatttactccactctcccaatttactcctagcataatatccattgttttgttaacaagacattactatcaca

SEQ ID NO: 23776 - DNA, 597 bp, synthetic construct
  source 1..597: mol_type = other DNA
ccagcaccaccacgaacaagcacttctgtaaccccggtgaccttgtataagctgtacccacggctgaaagcgagtgatccgttatccgcttaagtacttcgagaagcctagtatcaccttagaatcttcgatgcgttgcgctcagcactctatcccgagtgtagcttaggctgatgagtctgggcgttcctcaccggcgacggtggcccaggctgcgttggcggcctacccatggctaacgccatgggacgctagatgtgaacaaggtgtgaagagcctattgagctacttaagagtcctccggcccctgaatgcggctaatcccaaccacggagcaggtgccttcaacccagagggtggcctgtcgtaacgcgcaagtctgtggcggaaccgactactttgggtgtccgtgtttccttttatcttttatatggctgcttatggtgacaatcatagattgttatcataaagcgacttggattggccatccggtaaaatacaaacacatcatttacttgtttgttggatttactccactctcccaatttactcctagcataatatccattgttttgttaacaagacattactatcaca

SEQ ID NO: 23777 - DNA, 547 bp, synthetic construct
  source 1..547: mol_type = other DNA
gctgtacccacggctgaaagcgagtgatccgttatccgcttaagtacttcgagaagcctagtatcaccttagaatcttcgatgcgttgcgctcagcactctatcccgagtgtagcttaggctgatgagtctgggcgttcctcaccggcgacggtggcccaggctgcgttggcggcctacccatggctaacgccatgggacgctagatgtgaacaaggtgtgaagagcctattgagctacttaagagtcctccggcccctgaatgcggctaatcccaaccacggagcaggtgccttcaacccagagggtggcctgtcgtaacgcgcaagtctgtggcggaaccgactactttgggtgtccgtgtttccttttatcttttatatggctgcttatggtgacaatcatagattgttatcataaagcgacttggattggccatccggtaaaatacaaacacatcatttacttgtttgttggatttactccactctcccaatttactcctagcataatatccattgttttgttaacaagacattactatcaca

SEQ ID NO: 23778 - DNA, 697 bp, synthetic construct
  source 1..697: mol_type = other DNA
gtactctggtacccggtacccttgtacgcctgttttatatcccccttcccatgtaactttagaagcaattcactaagttcaacagggggggtgcaaaccagtaccaccacgaacaagcacttctgtttccccggtgatttcacataagctgtgcccacggccgaaagtggatgatccgttacccgcttgggtacttcgagaagcctagtatcaccttggaatcttcgacgcgttgcgttcagcgctctaacccgagtgtagcttaggctgatgagtctgggcgatccccaccggtgacggtggcccaggctgcgttggcggcctacccatggttaacgccatgggacgctagttttgaacaaggtgtgaagagcctattgagctactcaagagtcctccggcccctgaatgcggctaatcccaaccacggagcaagtgtcctcaaaccagagggtggcttgtcgtaacgcgcaagtctgtggcggaaccgactactttgggtgaccgtgtttccttttatttcatatttggctgcttatggtgacaatcacggattgttatcataaagcgaattggattggccatccggtgaaatacaagcacattatttacctttttgtcggattcattccaatagaatattcttcgccaaagttgatccaaataatcttagtgattagaagttattatttcagca

SEQ ID NO: 23779 - DNA, 647 bp, synthetic construct
  source 1..647: mol_type = other DNA
atgtaactttagaagcaattcactaagttcaacagggggggtgcaaaccagtaccaccacgaacaagcacttctgtttccccggtgatttcacataagctgtgcccacggccgaaagtggatgatccgttacccgcttgggtacttcgagaagcctagtatcaccttggaatcttcgacgcgttgcgttcagcgctctaacccgagtgtagcttaggctgatgagtctgggcgatccccaccggtgacggtggcccaggctgcgttggcggcctacccatggttaacgccatgggacgctagttttgaacaaggtgtgaagagcctattgagctactcaagagtcctccggcccctgaatgcggctaatcccaaccacggagcaagtgtcctcaaaccagagggtggcttgtcgtaacgcgcaagtctgtggcggaaccgactactttgggtgaccgtgtttccttttatttcatatttggctgcttatggtgacaatcacggattgttatcataaagcgaattggattggccatccggtgaaatacaagcacattatttacctttttgtcggattcattccaatagaatattcttcgccaaagttgatccaaataatcttagtgattagaagttattatttcagca

SEQ ID NO: 23780 - DNA, 597 bp, synthetic construct
  source 1..597: mol_type = other DNA
gtaccaccacgaacaagcacttctgtttccccggtgatttcacataagctgtgcccacggccgaaagtggatgatccgttacccgcttgggtacttcgagaagcctagtatcaccttggaatcttcgacgcgttgcgttcagcgctctaacccgagtgtagcttaggctgatgagtctgggcgatccccaccggtgacggtggcccaggctgcgttggcggcctacccatggttaacgccatgggacgctagttttgaacaaggtgtgaagagcctattgagctactcaagagtcctccggcccctgaatgcggctaatcccaaccacggagcaagtgtcctcaaaccagagggtggcttgtcgtaacgcgcaagtctgtggcggaaccgactactttgggtgaccgtgtttccttttatttcatatttggctgcttatggtgacaatcacggattgttatcataaagcgaattggattggccatccggtgaaatacaagcacattatttacctttttgtcggattcattccaatagaatattcttcgccaaagttgatccaaataatcttagtgattagaagttattatttcagca

SEQ ID NO: 23781 - DNA, 547 bp, synthetic construct
  source 1..547: mol_type = other DNA
gtgcccacggccgaaagtggatgatccgttacccgcttgggtacttcgagaagcctagtatcaccttggaatcttcgacgcgttgcgttcagcgctctaacccgagtgtagcttaggctgatgagtctgggcgatccccaccggtgacggtggcccaggctgcgttggcggcctacccatggttaacgccatgggacgctagttttgaacaaggtgtgaagagcctattgagctactcaagagtcctccggcccctgaatgcggctaatcccaaccacggagcaagtgtcctcaaaccagagggtggcttgtcgtaacgcgcaagtctgtggcggaaccgactactttgggtgaccgtgtttccttttatttcatatttggctgcttatggtgacaatcacggattgttatcataaagcgaattggattggccatccggtgaaatacaagcacattatttacctttttgtcggattcattccaatagaatattcttcgccaaagttgatccaaataatcttagtgattagaagttattatttcagca

SEQ ID NO: 23782 - DNA, 697 bp, synthetic construct
  source 1..697: mol_type = other DNA
gtactccggtattacggtacccttgtacgcctgttttatactcccttcccctgtaacttagaagcatacaaaccaagttcaatagaagggggtacaaaccagtaccaccacgaacaagcactcctgtttccccggtgacattgcatagactgtacccacggttgaaagcgatcgatccgttacccgctcctgtacttcgagaagcctagtatcatcttggaatcttcgatgcgttgcgctcagcactcaaccccagagtgtagcttaggctgatgagtctggacgtcccccaccggcgacggtggtccaggctgcgttggcggcctacctgtggcccaaagccacaggacgctagttgtgaacaaggtgtgaagagcctattgagctacaagagagtcctccggcccctgaatgcggctaatcctaaccacggagcaggcagttgcaaaccagcaaccggcctgtcgtaacgcgcaagtctgtggcggaaccgactactttgggtgtccgtgtttccttttatttttacaatggctgcttatggtgacaatcatagattgttatcataaagcgacttggattggccatccggtgaaagtaaaacacattgtttacttgtttgttggattcactccaattaacacttttacttacaaactcattacaacaactctattaattagagataagcatcaca

SEQ ID NO: 23783 - DNA, 647 bp, synthetic construct
  source 1..647: mol_type = other DNA
ctgtaacttagaagcatacaaaccaagttcaatagaagggggtacaaaccagtaccaccacgaacaagcactcctgtttccccggtgacattgcatagactgtacccacggttgaaagcgatcgatccgttacccgctcctgtacttcgagaagcctagtatcatcttggaatcttcgatgcgttgcgctcagcactcaaccccagagtgtagcttaggctgatgagtctggacgtcccccaccggcgacggtggtccaggctgcgttggcggcctacctgtggcccaaagccacaggacgctagttgtgaacaaggtgtgaagagcctattgagctacaagagagtcctccggcccctgaatgcggctaatcctaaccacggagcaggcagttgcaaaccagcaaccggcctgtcgtaacgcgcaagtctgtggcggaaccgactactttgggtgtccgtgtttccttttatttttacaatggctgcttatggtgacaatcatagattgttatcataaagcgacttggattggccatccggtgaaagtaaaacacattgtttacttgtttgttggattcactccaattaacacttttacttacaaactcattacaacaactctattaattagagataagcatcaca

SEQ ID NO: 23784 - DNA, 597 bp, synthetic construct
  source 1..597: mol_type = other DNA
agtaccaccacgaacaagcactcctgtttccccggtgacattgcatagactgtacccacggttgaaagcgatcgatccgttacccgctcctgtacttcgagaagcctagtatcatcttggaatcttcgatgcgttgcgctcagcactcaaccccagagtgtagcttaggctgatgagtctggacgtcccccaccggcgacggtggtccaggctgcgttggcggcctacctgtggcccaaagccacaggacgctagttgtgaacaaggtgtgaagagcctattgagctacaagagagtcctccggcccctgaatgcggctaatcctaaccacggagcaggcagttgcaaaccagcaaccggcctgtcgtaacgcgcaagtctgtggcggaaccgactactttgggtgtccgtgtttccttttatttttacaatggctgcttatggtgacaatcatagattgttatcataaagcgacttggattggccatccggtgaaagtaaaacacattgtttacttgtttgttggattcactccaattaacacttttacttacaaactcattacaacaactctattaattagagataagcatcaca

SEQ ID NO: 23785 - DNA, 547 bp, synthetic construct
  source 1..547: mol_type = other DNA
tgtacccacggttgaaagcgatcgatccgttacccgctcctgtacttcgagaagcctagtatcatcttggaatcttcgatgcgttgcgctcagcactcaaccccagagtgtagcttaggctgatgagtctggacgtcccccaccggcgacggtggtccaggctgcgttggcggcctacctgtggcccaaagccacaggacgctagttgtgaacaaggtgtgaagagcctattgagctacaagagagtcctccggcccctgaatgcggctaatcctaaccacggagcaggcagttgcaaaccagcaaccggcctgtcgtaacgcgcaagtctgtggcggaaccgactactttgggtgtccgtgtttccttttatttttacaatggctgcttatggtgacaatcatagattgttatcataaagcgacttggattggccatccggtgaaagtaaaacacattgtttacttgtttgttggattcactccaattaacacttttacttacaaactcattacaacaactctattaattagagataagcatcaca

SEQ ID NO: 23786 - DNA, 697 bp, synthetic construct
  source 1..697: mol_type = other DNA
gtacactggtattacggtacccttgtacgcctgttttatactcccttccccgtaacttagaagctatgtaatccaagttcaatagaagggggtacaaaccagtaccaccacgaacgagcacttctgtttccccggtgagattgtataagctgttcccacggccgaaaacgatcgatccgttacccgctcttgcacttcgagaagcctagtatcatcttgggatcttcgatgcgttgcgctcagcactctaccccagagtgtagcttaggtcgatgagtctggacattcctcaccggcgacggtggtccaggctgcgttggcggcctacctgtggtccaaagccacaggacgctagttgtaaacaaggtgtgaagagcctattgagctgcaagagagtcctccggcccctgaatgcggctaatcccaaccacggagcaggtggttgcaacccagtaactggcctgtcgtaacgcgtaagtctgtggcggaaccgactactttgggtgtccgtgtttccttttatttctataatggctgcttatggtgacaatcatagattgttatcataaagcgaattggattggccatccggtgagagttaagacaattatccacttgtttgttggatttacccctctgactaattacacactcaactttattaggattgtcattctagtgagatattaccatcaca

SEQ ID NO: 23787 - DNA, 647 bp, synthetic construct
  source 1..647: mol_type = other DNA
cgtaacttagaagctatgtaatccaagttcaatagaagggggtacaaaccagtaccaccacgaacgagcacttctgtttccccggtgagattgtataagctgttcccacggccgaaaacgatcgatccgttacccgctcttgcacttcgagaagcctagtatcatcttgggatcttcgatgcgttgcgctcagcactctaccccagagtgtagcttaggtcgatgagtctggacattcctcaccggcgacggtggtccaggctgcgttggcggcctacctgtggtccaaagccacaggacgctagttgtaaacaaggtgtgaagagcctattgagctgcaagagagtcctccggcccctgaatgcggctaatcccaaccacggagcaggtggttgcaacccagtaactggcctgtcgtaacgcgtaagtctgtggcggaaccgactactttgggtgtccgtgtttccttttatttctataatggctgcttatggtgacaatcatagattgttatcataaagcgaattggattggccatccggtgagagttaagacaattatccacttgtttgttggatttacccctctgactaattacacactcaactttattaggattgtcattctagtgagatattaccatcaca

SEQ ID NO: 23788 - DNA, 597 bp, synthetic construct
  source 1..597: mol_type = other DNA
agtaccaccacgaacgagcacttctgtttccccggtgagattgtataagctgttcccacggccgaaaacgatcgatccgttacccgctcttgcacttcgagaagcctagtatcatcttgggatcttcgatgcgttgcgctcagcactctaccccagagtgtagcttaggtcgatgagtctggacattcctcaccggcgacggtggtccaggctgcgttggcggcctacctgtggtccaaagccacaggacgctagttgtaaacaaggtgtgaagagcctattgagctgcaagagagtcctccggcccctgaatgcggctaatcccaaccacggagcaggtggttgcaacccagtaactggcctgtcgtaacgcgtaagtctgtggcggaaccgactactttgggtgtccgtgtttccttttatttctataatggctgcttatggtgacaatcatagattgttatcataaagcgaattggattggccatccggtgagagttaagacaattatccacttgtttgttggatttacccctctgactaattacacactcaactttattaggattgtcattctagtgagatattaccatcaca

SEQ ID NO: 23789 - DNA, 547 bp, synthetic construct
  source 1..547: mol_type = other DNA
tgttcccacggccgaaaacgatcgatccgttacccgctcttgcacttcgagaagcctagtatcatcttgggatcttcgatgcgttgcgctcagcactctaccccagagtgtagcttaggtcgatgagtctggacattcctcaccggcgacggtggtccaggctgcgttggcggcctacctgtggtccaaagccacaggacgctagttgtaaacaaggtgtgaagagcctattgagctgcaagagagtcctccggcccctgaatgcggctaatcccaaccacggagcaggtggttgcaacccagtaactggcctgtcgtaacgcgtaagtctgtggcggaaccgactactttgggtgtccgtgtttccttttatttctataatggctgcttatggtgacaatcatagattgttatcataaagcgaattggattggccatccggtgagagttaagacaattatccacttgtttgttggatttacccctctgactaattacacactcaactttattaggattgtcattctagtgagatattaccatcaca

SEQ ID NO: 23790 - DNA, 697 bp, synthetic construct
  source 1..697: mol_type = other DNA
gtactccggtatcacggtacccttgtacgcctgttttacactcccttcccccgtaacttagaagaaacaaacaaagttcaatagaagggggtacaaaccagtaccaccacgaacaagcacttctgtttccccggtgacgttgtatagactgtacccacggtcgaaaacgattgatccgttatccgcttttgtacttcgagaagcctagtatcatcttggaatcttcgatgcgttgcgctcagcactcaatcccagagtgtagcttaggtcgatgagtctggacgttcctcaccggcgacggtggtccaggctgcgttggcggcctacctgtggcccaaagccacaggacgctagttgtgaacaaggtgtgaagagcctattgagctacaagagagtcctccggcccctgaatgcggctaatcctaaccacggagcaagggtgtgtgagccaacacataccttgtcgtaatgcgtaagttcgtggcggaaccgactactttgggtgtccgtgtttccttttattcttgtattggctgcttatggtgacaatcatagattgttatcataaagcgacttggattggccatccagtggaagtgaaataccttgtctacctgtctgttggttttactccatttgactaattcacttacaagcttattgctataatttttattgactaaacaacaatactaca

SEQ ID NO: 23791 - DNA, 647 bp, synthetic construct
  source 1..647: mol_type = other DNA
ccgtaacttagaagaaacaaacaaagttcaatagaagggggtacaaaccagtaccaccacgaacaagcacttctgtttccccggtgacgttgtatagactgtacccacggtcgaaaacgattgatccgttatccgcttttgtacttcgagaagcctagtatcatcttggaatcttcgatgcgttgcgctcagcactcaatcccagagtgtagcttaggtcgatgagtctggacgttcctcaccggcgacggtggtccaggctgcgttggcggcctacctgtggcccaaagccacaggacgctagttgtgaacaaggtgtgaagagcctattgagctacaagagagtcctccggcccctgaatgcggctaatcctaaccacggagcaagggtgtgtgagccaacacataccttgtcgtaatgcgtaagttcgtggcggaaccgactactttgggtgtccgtgtttccttttattcttgtattggctgcttatggtgacaatcatagattgttatcataaagcgacttggattggccatccagtggaagtgaaataccttgtctacctgtctgttggttttactccatttgactaattcacttacaagcttattgctataatttttattgactaaacaacaatactaca

SEQ ID NO: 23792 - DNA, 597 bp, synthetic construct
  source 1..597: mol_type = other DNA
gtaccaccacgaacaagcacttctgtttccccggtgacgttgtatagactgtacccacggtcgaaaacgattgatccgttatccgcttttgtacttcgagaagcctagtatcatcttggaatcttcgatgcgttgcgctcagcactcaatcccagagtgtagcttaggtcgatgagtctggacgttcctcaccggcgacggtggtccaggctgcgttggcggcctacctgtggcccaaagccacaggacgctagttgtgaacaaggtgtgaagagcctattgagctacaagagagtcctccggcccctgaatgcggctaatcctaaccacggagcaagggtgtgtgagccaacacataccttgtcgtaatgcgtaagttcgtggcggaaccgactactttgggtgtccgtgtttccttttattcttgtattggctgcttatggtgacaatcatagattgttatcataaagcgacttggattggccatccagtggaagtgaaataccttgtctacctgtctgttggttttactccatttgactaattcacttacaagcttattgctataatttttattgactaaacaacaatactaca

SEQ ID NO: 23793 - DNA, 547 bp, synthetic construct
  source 1..547: mol_type = other DNA
gtacccacggtcgaaaacgattgatccgttatccgcttttgtacttcgagaagcctagtatcatcttggaatcttcgatgcgttgcgctcagcactcaatcccagagtgtagcttaggtcgatgagtctggacgttcctcaccggcgacggtggtccaggctgcgttggcggcctacctgtggcccaaagccacaggacgctagttgtgaacaaggtgtgaagagcctattgagctacaagagagtcctccggcccctgaatgcggctaatcctaaccacggagcaagggtgtgtgagccaacacataccttgtcgtaatgcgtaagttcgtggcggaaccgactactttgggtgtccgtgtttccttttattcttgtattggctgcttatggtgacaatcatagattgttatcataaagcgacttggattggccatccagtggaagtgaaataccttgtctacctgtctgttggttttactccatttgactaattcacttacaagcttattgctataatttttattgactaaacaacaatactaca

SEQ ID NO: 23794 - DNA, 697 bp, synthetic construct
  source 1..697: mol_type = other DNA
gtactctggtatcgcggtacctttgtacgcctgttttatactccccttccctgtaacttagaagcaaacaagccaagttcaatagaagggggtacaaaccagtaccaccacgaacaagcacttctgttaccccggtgaagttgtataaactgtccccacggttgaaaacgactgatccgttacccgcttttgtacttcgagaagcctagtaccatcttggaatcttcgatgcgttgcgctccgcactcaatcccagagtgtagcttaggtcgatgagtctggacagtcctcaccggcgacggtggtccaggctgcgttggcggcctacctgtggcccaaagccacaggacgctagttgtgaacaaggtgtgaagagcctattgagctacaaaagagtcctccggcccctgaatgcggctaatcctaaccatggagcaggtggttacaaaccagtaattgacctgtcgtaacgcgtaagtccgtggcggaaccgactactttgggtgtccgtgtttccttttatttttaatgcggctgcttatggtgacaatcattgattgttatcataaagcgaattggattggccatccggtgtgaataaaacttattgtctacttgtttgttggatacactccactaaacgcattcacccctagcattatttctatagtgatcaaaatcagacaattacattaca

SEQ ID NO: 23795 - DNA, 647 bp, synthetic construct
  source 1..647: mol_type = other DNA
ctgtaacttagaagcaaacaagccaagttcaatagaagggggtacaaaccagtaccaccacgaacaagcacttctgttaccccggtgaagttgtataaactgtccccacggttgaaaacgactgatccgttacccgcttttgtacttcgagaagcctagtaccatcttggaatcttcgatgcgttgcgctccgcactcaatcccagagtgtagcttaggtcgatgagtctggacagtcctcaccggcgacggtggtccaggctgcgttggcggcctacctgtggcccaaagccacaggacgctagttgtgaacaaggtgtgaagagcctattgagctacaaaagagtcctccggcccctgaatgcggctaatcctaaccatggagcaggtggttacaaaccagtaattgacctgtcgtaacgcgtaagtccgtggcggaaccgactactttgggtgtccgtgtttccttttatttttaatgcggctgcttatggtgacaatcattgattgttatcataaagcgaattggattggccatccggtgtgaataaaacttattgtctacttgtttgttggatacactccactaaacgcattcacccctagcattatttctatagtgatcaaaatcagacaattacattaca

SEQ ID NO: 23796 - DNA, 597 bp, synthetic construct
  source 1..597: mol_type = other DNA
agtaccaccacgaacaagcacttctgttaccccggtgaagttgtataaactgtccccacggttgaaaacgactgatccgttacccgcttttgtacttcgagaagcctagtaccatcttggaatcttcgatgcgttgcgctccgcactcaatcccagagtgtagcttaggtcgatgagtctggacagtcctcaccggcgacggtggtccaggctgcgttggcggcctacctgtggcccaaagccacaggacgctagttgtgaacaaggtgtgaagagcctattgagctacaaaagagtcctccggcccctgaatgcggctaatcctaaccatggagcaggtggttacaaaccagtaattgacctgtcgtaacgcgtaagtccgtggcggaaccgactactttgggtgtccgtgtttccttttatttttaatgcggctgcttatggtgacaatcattgattgttatcataaagcgaattggattggccatccggtgtgaataaaacttattgtctacttgtttgttggatacactccactaaacgcattcacccctagcattatttctatagtgatcaaaatcagacaattacattaca

SEQ ID NO: 23797 - DNA, 547 bp, synthetic construct
  source 1..547: mol_type = other DNA
tgtccccacggttgaaaacgactgatccgttacccgcttttgtacttcgagaagcctagtaccatcttggaatcttcgatgcgttgcgctccgcactcaatcccagagtgtagcttaggtcgatgagtctggacagtcctcaccggcgacggtggtccaggctgcgttggcggcctacctgtggcccaaagccacaggacgctagttgtgaacaaggtgtgaagagcctattgagctacaaaagagtcctccggcccctgaatgcggctaatcctaaccatggagcaggtggttacaaaccagtaattgacctgtcgtaacgcgtaagtccgtggcggaaccgactactttgggtgtccgtgtttccttttatttttaatgcggctgcttatggtgacaatcattgattgttatcataaagcgaattggattggccatccggtgtgaataaaacttattgtctacttgtttgttggatacactccactaaacgcattcacccctagcattatttctatagtgatcaaaatcagacaattacattaca

SEQ ID NO: 23798 - DNA, 697 bp, synthetic construct
  source 1..697: mol_type = other DNA
gcactctggtatcacggtacccttgtgcgcctgttttacaccccctccctgcaatttagaagcacaaaactaagttcaatagaagggggtacaaaccagtaccaccacgaacaagcacttctgtttccccggtgacattacatagactgctcacgcggttgaaagtgatcgatccgttacccgcttgtgtacttcgagaagcctagtatcactttgggatcttcgacgcgttgcgcccagcactcaaacccagggtgtagcttaggccgatgagtctggacgctcctcaccggcgacggtggtccaggctgcgttggcggcctacctatggctgacgccataggacgctagatgtgaacaaggtgtgaagagcctattgagctacgcaagagtcctccggcccctgaatgcggctaatcccaaccacggagcaggcggtcacaaaccagtgactggcttgtcgtaacgcgcaagtctgtggcggaaccgactactttgggtgtccgtgtttcctgttatctttattatggctgcttatggtgacaatcagagattgttaccataaagcgaattggattggccatccggtgtgtattgcattggatatacaactgtttactaaaattactgtgttatctctactttccatttaactggttaatcaggaacgatacgagaataaaacaacaacatcacg

SEQ ID NO: 23799 - DNA, 647 bp, synthetic construct
  source 1..647: mol_type = other DNA
gcaatttagaagcacaaaactaagttcaatagaagggggtacaaaccagtaccaccacgaacaagcacttctgtttccccggtgacattacatagactgctcacgcggttgaaagtgatcgatccgttacccgcttgtgtacttcgagaagcctagtatcactttgggatcttcgacgcgttgcgcccagcactcaaacccagggtgtagcttaggccgatgagtctggacgctcctcaccggcgacggtggtccaggctgcgttggcggcctacctatggctgacgccataggacgctagatgtgaacaaggtgtgaagagcctattgagctacgcaagagtcctccggcccctgaatgcggctaatcccaaccacggagcaggcggtcacaaaccagtgactggcttgtcgtaacgcgcaagtctgtggcggaaccgactactttgggtgtccgtgtttcctgttatctttattatggctgcttatggtgacaatcagagattgttaccataaagcgaattggattggccatccggtgtgtattgcattggatatacaactgtttactaaaattactgtgttatctctactttccatttaactggttaatcaggaacgatacgagaataaaacaacaacatcacg

SEQ ID NO: 23800 - DNA, 597 bp, synthetic construct
  source 1..597: mol_type = other DNA
accaccacgaacaagcacttctgtttccccggtgacattacatagactgctcacgcggttgaaagtgatcgatccgttacccgcttgtgtacttcgagaagcctagtatcactttgggatcttcgacgcgttgcgcccagcactcaaacccagggtgtagcttaggccgatgagtctggacgctcctcaccggcgacggtggtccaggctgcgttggcggcctacctatggctgacgccataggacgctagatgtgaacaaggtgtgaagagcctattgagctacgcaagagtcctccggcccctgaatgcggctaatcccaaccacggagcaggcggtcacaaaccagtgactggcttgtcgtaacgcgcaagtctgtggcggaaccgactactttgggtgtccgtgtttcctgttatctttattatggctgcttatggtgacaatcagagattgttaccataaagcgaattggattggccatccggtgtgtattgcattggatatacaactgtttactaaaattactgtgttatctctactttccatttaactggttaatcaggaacgatacgagaataaaacaacaacatcacg

SEQ ID NO: 23801 - DNA, 547 bp, synthetic construct
  source 1..547: mol_type = other DNA
tcacgcggttgaaagtgatcgatccgttacccgcttgtgtacttcgagaagcctagtatcactttgggatcttcgacgcgttgcgcccagcactcaaacccagggtgtagcttaggccgatgagtctggacgctcctcaccggcgacggtggtccaggctgcgttggcggcctacctatggctgacgccataggacgctagatgtgaacaaggtgtgaagagcctattgagctacgcaagagtcctccggcccctgaatgcggctaatcccaaccacggagcaggcggtcacaaaccagtgactggcttgtcgtaacgcgcaagtctgtggcggaaccgactactttgggtgtccgtgtttcctgttatctttattatggctgcttatggtgacaatcagagattgttaccataaagcgaattggattggccatccggtgtgtattgcattggatatacaactgtttactaaaattactgtgttatctctactttccatttaactggttaatcaggaacgatacgagaataaaacaacaacatcacg

SEQ ID NO: 23802 - DNA, 697 bp, synthetic construct
  source 1..697: mol_type = other DNA
ctagcacactggtatcacggtacccttgtgcgcctgttttatccaccccctccccaatgtaacatagaagcacaaactaagtggtcaatagacggctcagtgcaccaactgggtttagaccaagcacttctgttaccccggactgagtatcaataggctgctcacgcggctgaaggagaaaacgttcgttacccggccaactacttcgagaagcccagtaccaccatgaaggttgcgcagtgtttcgttcagcacaaccccagtgtagatcaggtcgatgagtcaccgcaatccccacgggcgaccgtggcggtggctgcgctggcggcctgcccatggggtgacccatgggacgcttcaattccgacatggtgcgaagagcctattgagctagttggtagtcctccggcccctgaatgcggctaatcccaactgcggagcaagcacccacaaaccagtgggctgtttgtcgtaacgggcaactctgcagcggaaccgactactttgggtgtccgtgtttccttttattcctacactggctgcttatggtgacaattgaaagattgttgccatatagctattggattggccatccggtaacaaacagagctattattcacttatttgttggctttgtgccgttgaatttcaaagttataaaaaccataacctccatcttgacactcaacacagcaaa

SEQ ID NO: 23803 - DNA, 647 bp, synthetic construct
  source 1..647: mol_type = other DNA
tccccaatgtaacatagaagcacaaactaagtggtcaatagacggctcagtgcaccaactgggtttagaccaagcacttctgttaccccggactgagtatcaataggctgctcacgcggctgaaggagaaaacgttcgttacccggccaactacttcgagaagcccagtaccaccatgaaggttgcgcagtgtttcgttcagcacaaccccagtgtagatcaggtcgatgagtcaccgcaatccccacgggcgaccgtggcggtggctgcgctggcggcctgcccatggggtgacccatgggacgcttcaattccgacatggtgcgaagagcctattgagctagttggtagtcctccggcccctgaatgcggctaatcccaactgcggagcaagcacccacaaaccagtgggctgtttgtcgtaacgggcaactctgcagcggaaccgactactttgggtgtccgtgtttccttttattcctacactggctgcttatggtgacaattgaaagattgttgccatatagctattggattggccatccggtaacaaacagagctattattcacttatttgttggctttgtgccgttgaatttcaaagttataaaaaccataacctccatcttgacactcaacacagcaaa

SEQ ID NO: 23804 - DNA, 597 bp, synthetic construct
  source 1..597: mol_type = other DNA
tgcaccaactgggtttagaccaagcacttctgttaccccggactgagtatcaataggctgctcacgcggctgaaggagaaaacgttcgttacccggccaactacttcgagaagcccagtaccaccatgaaggttgcgcagtgtttcgttcagcacaaccccagtgtagatcaggtcgatgagtcaccgcaatccccacgggcgaccgtggcggtggctgcgctggcggcctgcccatggggtgacccatgggacgcttcaattccgacatggtgcgaagagcctattgagctagttggtagtcctccggcccctgaatgcggctaatcccaactgcggagcaagcacccacaaaccagtgggctgtttgtcgtaacgggcaactctgcagcggaaccgactactttgggtgtccgtgtttccttttattcctacactggctgcttatggtgacaattgaaagattgttgccatatagctattggattggccatccggtaacaaacagagctattattcacttatttgttggctttgtgccgttgaatttcaaagttataaaaaccataacctccatcttgacactcaacacagcaaa

SEQ ID NO: 23805 - DNA, 547 bp, synthetic construct
  source 1..547: mol_type = other DNA
caataggctgctcacgcggctgaaggagaaaacgttcgttacccggccaactacttcgagaagcccagtaccaccatgaaggttgcgcagtgtttcgttcagcacaaccccagtgtagatcaggtcgatgagtcaccgcaatccccacgggcgaccgtggcggtggctgcgctggcggcctgcccatggggtgacccatgggacgcttcaattccgacatggtgcgaagagcctattgagctagttggtagtcctccggcccctgaatgcggctaatcccaactgcggagcaagcacccacaaaccagtgggctgtttgtcgtaacgggcaactctgcagcggaaccgactactttgggtgtccgtgtttccttttattcctacactggctgcttatggtgacaattgaaagattgttgccatatagctattggattggccatccggtaacaaacagagctattattcacttatttgttggctttgtgccgttgaatttcaaagttataaaaaccataacctccatcttgacactcaacacagcaaa

SEQ ID NO: 23806 - DNA, 698 bp, synthetic construct
  source 1..698: mol_type = other DNA
cactctggttctacggaacctttgtgcgcctgttttacgccccttcccccaatttgcaacttagaagcaatacacaacactggtcaacagtaggcatggcgcaccagccatgtcttgatcaagcacttctgtttccccggaccgagtatcaatagactgctcacgcggttgaaggagaaagcgtccgttatccggctaactacttcgagaaacttagtaacaccattgaagctgcagagtgtttcgctcggcacttcccccgtgtagatcaggtcgatgagtcactgcaatccccacgggtgaccgtggcagtggctgcgctggcggcctgcctatggggtaacccataggacgctctaatgcggacatggtgcgaagagtctattgagctagttagtggtcctccggcccctgaatgcggctaatcctaactgcggagcacatgccttcaatccagagggtagtgtgtcgtaatgggcaactctgcagcggaaccgactactttgggtgtccgtgtttccttttattcttatattggctgcttatggtgacaattacagaattgttaccatatagctattggattggccatccggtgtgcaatagagctattatatacctatttgttggctttgtgccactaaccttaaaatctataaccaccctcgactttatactaaccctcaatacagtcaaac

SEQ ID NO: 23807 - DNA, 648 bp, synthetic construct
  source 1..648: mol_type = other DNA
aatttgcaacttagaagcaatacacaacactggtcaacagtaggcatggcgcaccagccatgtcttgatcaagcacttctgtttccccggaccgagtatcaatagactgctcacgcggttgaaggagaaagcgtccgttatccggctaactacttcgagaaacttagtaacaccattgaagctgcagagtgtttcgctcggcacttcccccgtgtagatcaggtcgatgagtcactgcaatccccacgggtgaccgtggcagtggctgcgctggcggcctgcctatggggtaacccataggacgctctaatgcggacatggtgcgaagagtctattgagctagttagtggtcctccggcccctgaatgcggctaatcctaactgcggagcacatgccttcaatccagagggtagtgtgtcgtaatgggcaactctgcagcggaaccgactactttgggtgtccgtgtttccttttattcttatattggctgcttatggtgacaattacagaattgttaccatatagctattggattggccatccggtgtgcaatagagctattatatacctatttgttggctttgtgccactaaccttaaaatctataaccaccctcgactttatactaaccctcaatacagtcaaac

SEQ ID NO: 23808 - DNA, 598 bp, synthetic construct
  source 1..598: mol_type = other DNA
gcaccagccatgtcttgatcaagcacttctgtttccccggaccgagtatcaatagactgctcacgcggttgaaggagaaagcgtccgttatccggctaactacttcgagaaacttagtaacaccattgaagctgcagagtgtttcgctcggcacttcccccgtgtagatcaggtcgatgagtcactgcaatccccacgggtgaccgtggcagtggctgcgctggcggcctgcctatggggtaacccataggacgctctaatgcggacatggtgcgaagagtctattgagctagttagtggtcctccggcccctgaatgcggctaatcctaactgcggagcacatgccttcaatccagagggtagtgtgtcgtaatgggcaactctgcagcggaaccgactactttgggtgtccgtgtttccttttattcttatattggctgcttatggtgacaattacagaattgttaccatatagctattggattggccatccggtgtgcaatagagctattatatacctatttgttggctttgtgccactaaccttaaaatctataaccaccctcgactttatactaaccctcaatacagtcaaac

SEQ ID NO: 23809 - DNA, 548 bp, synthetic construct
  source 1..548: mol_type = other DNA
aatagactgctcacgcggttgaaggagaaagcgtccgttatccggctaactacttcgagaaacttagtaacaccattgaagctgcagagtgtttcgctcggcacttcccccgtgtagatcaggtcgatgagtcactgcaatccccacgggtgaccgtggcagtggctgcgctggcggcctgcctatggggtaacccataggacgctctaatgcggacatggtgcgaagagtctattgagctagttagtggtcctccggcccctgaatgcggctaatcctaactgcggagcacatgccttcaatccagagggtagtgtgtcgtaatgggcaactctgcagcggaaccgactactttgggtgtccgtgtttccttttattcttatattggctgcttatggtgacaattacagaattgttaccatatagctattggattggccatccggtgtgcaatagagctattatatacctatttgttggctttgtgccactaaccttaaaatctataaccaccctcgactttatactaaccctcaatacagtcaaac

SEQ ID NO: 23810 - DNA, 698 bp, synthetic construct
  source 1..698: mol_type = other DNA
agcactctgattccgcggaatctttgtgcgcctgttttataacccctcccccgatttgtaatttagaagtaatgcacaccactgatcaacagcaagcgtggcgcgccagccatgttcagatcaaatacttctgttttcccggactgagtatcaatagactgctcacgcggttgaaggagaaaacgttcgttacccggctaactacttcgagaaacctagtagcaccatcgaaactgcagagtgtttcgctcagcactttccccgtgtagatcaggtcgatgagtcactgcaatccccacgggcgaccgtggcagtggctgcgttggcggcctgcctatgggcttgcccataggacgctctaatgtggacatggtgtgaagagtctattgagctagttggtagtcctccggcccctgaatgcggctaatcctaactgcagagcgcataccctcaatccagggggtggtgcgtcgtaacgggcaactctgcagcggaaccgactactttgggtgtccgtgtttccttttattcttatattggctgcttatggtgacaattgagagattgttgccatatagctattggattggccatccagtgtctaacagagcaattgtatacttgtttgttggattcgttccactgtcatatacatccactaacaccttatactatattacaaaattgaacacaagaaa

SEQ ID NO: 23811 - DNA, 648 bp, synthetic construct
  source 1..648: mol_type = other DNA
ccgatttgtaatttagaagtaatgcacaccactgatcaacagcaagcgtggcgcgccagccatgttcagatcaaatacttctgttttcccggactgagtatcaatagactgctcacgcggttgaaggagaaaacgttcgttacccggctaactacttcgagaaacctagtagcaccatcgaaactgcagagtgtttcgctcagcactttccccgtgtagatcaggtcgatgagtcactgcaatccccacgggcgaccgtggcagtggctgcgttggcggcctgcctatgggcttgcccataggacgctctaatgtggacatggtgtgaagagtctattgagctagttggtagtcctccggcccctgaatgcggctaatcctaactgcagagcgcataccctcaatccagggggtggtgcgtcgtaacgggcaactctgcagcggaaccgactactttgggtgtccgtgtttccttttattcttatattggctgcttatggtgacaattgagagattgttgccatatagctattggattggccatccagtgtctaacagagcaattgtatacttgtttgttggattcgttccactgtcatatacatccactaacaccttatactatattacaaaattgaacacaagaaa

SEQ ID NO: 23812 - DNA, 598 bp, synthetic construct
  source 1..598: mol_type = other DNA
gcgcgccagccatgttcagatcaaatacttctgttttcccggactgagtatcaatagactgctcacgcggttgaaggagaaaacgttcgttacccggctaactacttcgagaaacctagtagcaccatcgaaactgcagagtgtttcgctcagcactttccccgtgtagatcaggtcgatgagtcactgcaatccccacgggcgaccgtggcagtggctgcgttggcggcctgcctatgggcttgcccataggacgctctaatgtggacatggtgtgaagagtctattgagctagttggtagtcctccggcccctgaatgcggctaatcctaactgcagagcgcataccctcaatccagggggtggtgcgtcgtaacgggcaactctgcagcggaaccgactactttgggtgtccgtgtttccttttattcttatattggctgcttatggtgacaattgagagattgttgccatatagctattggattggccatccagtgtctaacagagcaattgtatacttgtttgttggattcgttccactgtcatatacatccactaacaccttatactatattacaaaattgaacacaagaaa

SEQ ID NO: 23813 - DNA, 548 bp, synthetic construct
  source 1..548: mol_type = other DNA
tcaatagactgctcacgcggttgaaggagaaaacgttcgttacccggctaactacttcgagaaacctagtagcaccatcgaaactgcagagtgtttcgctcagcactttccccgtgtagatcaggtcgatgagtcactgcaatccccacgggcgaccgtggcagtggctgcgttggcggcctgcctatgggcttgcccataggacgctctaatgtggacatggtgtgaagagtctattgagctagttggtagtcctccggcccctgaatgcggctaatcctaactgcagagcgcataccctcaatccagggggtggtgcgtcgtaacgggcaactctgcagcggaaccgactactttgggtgtccgtgtttccttttattcttatattggctgcttatggtgacaattgagagattgttgccatatagctattggattggccatccagtgtctaacagagcaattgtatacttgtttgttggattcgttccactgtcatatacatccactaacaccttatactatattacaaaattgaacacaagaaa

SEQ ID NO: 23814 - DNA, 698 bp, synthetic construct
  source 1..698: mol_type = other DNA
agcactctggtattacggtacctttgtgcgcctgttttatatcccttcccccatgtaacttagaagatattaaacaaagttcaataggagggggtacaaaccagtgccaccacgaacaaacacttctgtttccccggtgaagctacatagactgttcccacggttgaaagtggcagatccgttatccgctttggtacttcgagaaacctagtaccaccttggaatcttcgatgcgttgcgctcagcactcaaccccagagtgtagcttaggtcgatgagtctggacgatcctcactggcgacagtggtccaggctgcgttggcggcctacctgtggcgaaagccacaggacgctagttgtgaacaaggtgtgaagagtctattgagctaccaaagagtcctccggcccctgaatgcggctaatcccaaccacggagcaagtgcccacaaaccagtgggtggcttgtcgtaatgcgtaagtctgtggcggaaccgactactttgggtgtccgtgtttccttttatttttatcatggctgcttatggtgacaatctaagattgttatcatatagctattggattggccatccggtgactaacagagatcttgcatacctgtttgttggttttactaaactagatatagttacatttaaaactcttctttatatcatacagttgaatagtagaaagagaaa

SEQ ID NO: 23815 - DNA, 648 bp, synthetic construct
  source 1..648: mol_type = other DNA
ccatgtaacttagaagatattaaacaaagttcaataggagggggtacaaaccagtgccaccacgaacaaacacttctgtttccccggtgaagctacatagactgttcccacggttgaaagtggcagatccgttatccgctttggtacttcgagaaacctagtaccaccttggaatcttcgatgcgttgcgctcagcactcaaccccagagtgtagcttaggtcgatgagtctggacgatcctcactggcgacagtggtccaggctgcgttggcggcctacctgtggcgaaagccacaggacgctagttgtgaacaaggtgtgaagagtctattgagctaccaaagagtcctccggcccctgaatgcggctaatcccaaccacggagcaagtgcccacaaaccagtgggtggcttgtcgtaatgcgtaagtctgtggcggaaccgactactttgggtgtccgtgtttccttttatttttatcatggctgcttatggtgacaatctaagattgttatcatatagctattggattggccatccggtgactaacagagatcttgcatacctgtttgttggttttactaaactagatatagttacatttaaaactcttctttatatcatacagttgaatagtagaaagagaaa

SEQ ID NO: 23816 - DNA, 598 bp, synthetic construct
  source 1..598: mol_type = other DNA
ccagtgccaccacgaacaaacacttctgtttccccggtgaagctacatagactgttcccacggttgaaagtggcagatccgttatccgctttggtacttcgagaaacctagtaccaccttggaatcttcgatgcgttgcgctcagcactcaaccccagagtgtagcttaggtcgatgagtctggacgatcctcactggcgacagtggtccaggctgcgttggcggcctacctgtggcgaaagccacaggacgctagttgtgaacaaggtgtgaagagtctattgagctaccaaagagtcctccggcccctgaatgcggctaatcccaaccacggagcaagtgcccacaaaccagtgggtggcttgtcgtaatgcgtaagtctgtggcggaaccgactactttgggtgtccgtgtttccttttatttttatcatggctgcttatggtgacaatctaagattgttatcatatagctattggattggccatccggtgactaacagagatcttgcatacctgtttgttggttttactaaactagatatagttacatttaaaactcttctttatatcatacagttgaatagtagaaagagaaa

SEQ ID NO: 23817 - DNA, 548 bp, synthetic construct
  source 1..548: mol_type = other DNA
actgttcccacggttgaaagtggcagatccgttatccgctttggtacttcgagaaacctagtaccaccttggaatcttcgatgcgttgcgctcagcactcaaccccagagtgtagcttaggtcgatgagtctggacgatcctcactggcgacagtggtccaggctgcgttggcggcctacctgtggcgaaagccacaggacgctagttgtgaacaaggtgtgaagagtctattgagctaccaaagagtcctccggcccctgaatgcggctaatcccaaccacggagcaagtgcccacaaaccagtgggtggcttgtcgtaatgcgtaagtctgtggcggaaccgactactttgggtgtccgtgtttccttttatttttatcatggctgcttatggtgacaatctaagattgttatcatatagctattggattggccatccggtgactaacagagatcttgcatacctgtttgttggttttactaaactagatatagttacatttaaaactcttctttatatcatacagttgaatagtagaaagagaaa

SEQ ID NO: 23818 - DNA, 698 bp, synthetic construct
  source 1..698: mol_type = other DNA
caccctgattctgcggaatctttgtgcgcctgttttacaacccttcccccgatttgtaatttagaagcaacgaacctcaccgatcaatagtaggcgtggcgcgccagctacgtcttgatcaagcacttctgtttccccgggctgagtatcaatagactgcttgcgcggtcgaaggagaaaacgctcgttatccggctaactacttcgagaaacccagtaacaccattgaaactgcagagtgtttcgctcagcacttcccccgtgtagatcaggtcgatgagtcactgcaatccccacgggcgaccgtggcagtggctgcgttggcggcctgcctatggggcaacccataggacgctctaaggtggacatggtgtgaagagtctattgagctagttagtagtcctccggcccctgaatgcggctaatcctaactgcggagcgcatgccctcaaaccagagggtggtgcgtcgtaatgggcaactctgcagcggaaccgactactttgggtgtccgtgtttccttttattctcttaatggctgcttatggtgacaattaaggaattgttaccatatagctattggattggccatccggtgtgtagtagagctattatttatctatttgttggttttgtaccattaaacttaaggtctgtcaccactttacaatatatactgatcctcaatacggttaagc

SEQ ID NO: 23819 - DNA, 648 bp, synthetic construct
  source 1..648: mol_type = other DNA
gatttgtaatttagaagcaacgaacctcaccgatcaatagtaggcgtggcgcgccagctacgtcttgatcaagcacttctgtttccccgggctgagtatcaatagactgcttgcgcggtcgaaggagaaaacgctcgttatccggctaactacttcgagaaacccagtaacaccattgaaactgcagagtgtttcgctcagcacttcccccgtgtagatcaggtcgatgagtcactgcaatccccacgggcgaccgtggcagtggctgcgttggcggcctgcctatggggcaacccataggacgctctaaggtggacatggtgtgaagagtctattgagctagttagtagtcctccggcccctgaatgcggctaatcctaactgcggagcgcatgccctcaaaccagagggtggtgcgtcgtaatgggcaactctgcagcggaaccgactactttgggtgtccgtgtttccttttattctcttaatggctgcttatggtgacaattaaggaattgttaccatatagctattggattggccatccggtgtgtagtagagctattatttatctatttgttggttttgtaccattaaacttaaggtctgtcaccactttacaatatatactgatcctcaatacggttaagc

SEQ ID NO: 23820 - DNA, 598 bp, synthetic construct
  source 1..598: mol_type = other DNA
gcgccagctacgtcttgatcaagcacttctgtttccccgggctgagtatcaatagactgcttgcgcggtcgaaggagaaaacgctcgttatccggctaactacttcgagaaacccagtaacaccattgaaactgcagagtgtttcgctcagcacttcccccgtgtagatcaggtcgatgagtcactgcaatccccacgggcgaccgtggcagtggctgcgttggcggcctgcctatggggcaacccataggacgctctaaggtggacatggtgtgaagagtctattgagctagttagtagtcctccggcccctgaatgcggctaatcctaactgcggagcgcatgccctcaaaccagagggtggtgcgtcgtaatgggcaactctgcagcggaaccgactactttgggtgtccgtgtttccttttattctcttaatggctgcttatggtgacaattaaggaattgttaccatatagctattggattggccatccggtgtgtagtagagctattatttatctatttgttggttttgtaccattaaacttaaggtctgtcaccactttacaatatatactgatcctcaatacggttaagc

SEQ ID NO: 23821 - DNA, 548 bp, synthetic construct
  source 1..548: mol_type = other DNA
aatagactgcttgcgcggtcgaaggagaaaacgctcgttatccggctaactacttcgagaaacccagtaacaccattgaaactgcagagtgtttcgctcagcacttcccccgtgtagatcaggtcgatgagtcactgcaatccccacgggcgaccgtggcagtggctgcgttggcggcctgcctatggggcaacccataggacgctctaaggtggacatggtgtgaagagtctattgagctagttagtagtcctccggcccctgaatgcggctaatcctaactgcggagcgcatgccctcaaaccagagggtggtgcgtcgtaatgggcaactctgcagcggaaccgactactttgggtgtccgtgtttccttttattctcttaatggctgcttatggtgacaattaaggaattgttaccatatagctattggattggccatccggtgtgtagtagagctattatttatctatttgttggttttgtaccattaaacttaaggtctgtcaccactttacaatatatactgatcctcaatacggttaagc

SEQ ID NO: 23822 - DNA, 698 bp, synthetic construct
  source 1..698: mol_type = other DNA
ctagcactctggcactaaggtacctttgtgcgcctgttttatttcccttcccccaaagtaatttagaagttatgcaccaacgatcaatagcaggtgtgacacaccagtcatatcttgatcaagtactcctgtttccccggaccgagtatcaataagctgctcgcgcggctgaaggagaaaacgttcgttacccgaccaactacttcgagaagcttagtaccaccatgaacgaggcagagtgtttcgttcagcacaaccccagtgtagatcaggctgatgagtcactgcaaaccccatgggcgaccatggcagtggctgcgttggcggcctgcccatggagaaatccatgggacgctctaattctgacatggtgtgaagagcctattgagctagttggtagtcctccggcccctgaatgcggctaatcctaactgcggagcacatgctcacaaaccagtgggtggtgtgtcgtaatgggtaactctgcagcggaaccgactactttgggtgtccgtgtttccttttattcttatgttggctgcttatggtgacaatcaaagaattgttaccatatagctattggattggccatccggtgtgcaacagagcaattgtttacctatttgttggttttgtaccactatcactgaagtctgtgatcactctcaaattcattctgaccctcaactcaatcaaac

SEQ ID NO: 23823 - DNA, 648 bp, synthetic construct
  source 1..648: mol_type = other DNA
ccccaaagtaatttagaagttatgcaccaacgatcaatagcaggtgtgacacaccagtcatatcttgatcaagtactcctgtttccccggaccgagtatcaataagctgctcgcgcggctgaaggagaaaacgttcgttacccgaccaactacttcgagaagcttagtaccaccatgaacgaggcagagtgtttcgttcagcacaaccccagtgtagatcaggctgatgagtcactgcaaaccccatgggcgaccatggcagtggctgcgttggcggcctgcccatggagaaatccatgggacgctctaattctgacatggtgtgaagagcctattgagctagttggtagtcctccggcccctgaatgcggctaatcctaactgcggagcacatgctcacaaaccagtgggtggtgtgtcgtaatgggtaactctgcagcggaaccgactactttgggtgtccgtgtttccttttattcttatgttggctgcttatggtgacaatcaaagaattgttaccatatagctattggattggccatccggtgtgcaacagagcaattgtttacctatttgttggttttgtaccactatcactgaagtctgtgatcactctcaaattcattctgaccctcaactcaatcaaac

SEQ ID NO: 23824 - DNA, 598 bp, synthetic construct
  source 1..598: mol_type = other DNA
acaccagtcatatcttgatcaagtactcctgtttccccggaccgagtatcaataagctgctcgcgcggctgaaggagaaaacgttcgttacccgaccaactacttcgagaagcttagtaccaccatgaacgaggcagagtgtttcgttcagcacaaccccagtgtagatcaggctgatgagtcactgcaaaccccatgggcgaccatggcagtggctgcgttggcggcctgcccatggagaaatccatgggacgctctaattctgacatggtgtgaagagcctattgagctagttggtagtcctccggcccctgaatgcggctaatcctaactgcggagcacatgctcacaaaccagtgggtggtgtgtcgtaatgggtaactctgcagcggaaccgactactttgggtgtccgtgtttccttttattcttatgttggctgcttatggtgacaatcaaagaattgttaccatatagctattggattggccatccggtgtgcaacagagcaattgtttacctatttgttggttttgtaccactatcactgaagtctgtgatcactctcaaattcattctgaccctcaactcaatcaaac

SEQ ID NO: 23825 - DNA, 548 bp, synthetic construct
  source 1..548: mol_type = other DNA
aataagctgctcgcgcggctgaaggagaaaacgttcgttacccgaccaactacttcgagaagcttagtaccaccatgaacgaggcagagtgtttcgttcagcacaaccccagtgtagatcaggctgatgagtcactgcaaaccccatgggcgaccatggcagtggctgcgttggcggcctgcccatggagaaatccatgggacgctctaattctgacatggtgtgaagagcctattgagctagttggtagtcctccggcccctgaatgcggctaatcctaactgcggagcacatgctcacaaaccagtgggtggtgtgtcgtaatgggtaactctgcagcggaaccgactactttgggtgtccgtgtttccttttattcttatgttggctgcttatggtgacaatcaaagaattgttaccatatagctattggattggccatccggtgtgcaacagagcaattgtttacctatttgttggttttgtaccactatcactgaagtctgtgatcactctcaaattcattctgaccctcaactcaatcaaac

SEQ ID NO: 23826 - DNA, 698 bp, synthetic construct
  source 1..698: mol_type = other DNA
gtacaccggtatcacggtacccttgtacgcctgttttatactccctttcccccgtaacttagaagcaataaaaccaagttcaatagaaagggggtacaaaccagtaccaccacgaacaagcacttctgtttccccggtgatgttgtatagactgtttccacggttgaaaacgactgatccgttatccgctcttgtacttcgagaagcctagtatcatcttgggatcttcgatgcgttgcgctcaacactcgaccccggagtgtagcttaggccgatgagtctggacgttccccaccggcgacggtggtccaggctgcgttggcggcctacctgtggtccaaagccacaggacgctagttgtgaacaaggtgtgaagagcctattgagctacttgagagtcctccggcccctgaatgcggctaatcccaaccacggagcaggtggttgcaatccagcaactagcctgtcgtaacgcgcaagtctgtggcggaaccgactactttgggtgtccgtgtttccttttatttttcattggctgcttatggtgacaatctcagattgttatcataaagcgagttggattggccatccggtgaaaatcagatcgattatttacctttttgttggatttacacctttaacattacacactttgaaactcattgaaattgtactgttgatacggtattactatcaca

SEQ ID NO: 23827 - DNA, 648 bp, synthetic construct
  source 1..648: mol_type = other DNA
cccgtaacttagaagcaataaaaccaagttcaatagaaagggggtacaaaccagtaccaccacgaacaagcacttctgtttccccggtgatgttgtatagactgtttccacggttgaaaacgactgatccgttatccgctcttgtacttcgagaagcctagtatcatcttgggatcttcgatgcgttgcgctcaacactcgaccccggagtgtagcttaggccgatgagtctggacgttccccaccggcgacggtggtccaggctgcgttggcggcctacctgtggtccaaagccacaggacgctagttgtgaacaaggtgtgaagagcctattgagctacttgagagtcctccggcccctgaatgcggctaatcccaaccacggagcaggtggttgcaatccagcaactagcctgtcgtaacgcgcaagtctgtggcggaaccgactactttgggtgtccgtgtttccttttatttttcattggctgcttatggtgacaatctcagattgttatcataaagcgagttggattggccatccggtgaaaatcagatcgattatttacctttttgttggatttacacctttaacattacacactttgaaactcattgaaattgtactgttgatacggtattactatcaca

SEQ ID NO: 23828 - DNA, 598 bp, synthetic construct
  source 1..598: mol_type = other DNA
ccagtaccaccacgaacaagcacttctgtttccccggtgatgttgtatagactgtttccacggttgaaaacgactgatccgttatccgctcttgtacttcgagaagcctagtatcatcttgggatcttcgatgcgttgcgctcaacactcgaccccggagtgtagcttaggccgatgagtctggacgttccccaccggcgacggtggtccaggctgcgttggcggcctacctgtggtccaaagccacaggacgctagttgtgaacaaggtgtgaagagcctattgagctacttgagagtcctccggcccctgaatgcggctaatcccaaccacggagcaggtggttgcaatccagcaactagcctgtcgtaacgcgcaagtctgtggcggaaccgactactttgggtgtccgtgtttccttttatttttcattggctgcttatggtgacaatctcagattgttatcataaagcgagttggattggccatccggtgaaaatcagatcgattatttacctttttgttggatttacacctttaacattacacactttgaaactcattgaaattgtactgttgatacggtattactatcaca

SEQ ID NO: 23829 - DNA, 548 bp, synthetic construct
  source 1..548: mol_type = other DNA
actgtttccacggttgaaaacgactgatccgttatccgctcttgtacttcgagaagcctagtatcatcttgggatcttcgatgcgttgcgctcaacactcgaccccggagtgtagcttaggccgatgagtctggacgttccccaccggcgacggtggtccaggctgcgttggcggcctacctgtggtccaaagccacaggacgctagttgtgaacaaggtgtgaagagcctattgagctacttgagagtcctccggcccctgaatgcggctaatcccaaccacggagcaggtggttgcaatccagcaactagcctgtcgtaacgcgcaagtctgtggcggaaccgactactttgggtgtccgtgtttccttttatttttcattggctgcttatggtgacaatctcagattgttatcataaagcgagttggattggccatccggtgaaaatcagatcgattatttacctttttgttggatttacacctttaacattacacactttgaaactcattgaaattgtactgttgatacggtattactatcaca

SEQ ID NO: 23830 - DNA, 698 bp, synthetic construct
  source 1..698: mol_type = other DNA
gtacaccggtatcgcggtacccttgtacgcctgttttatactcccttccccccgtaacttagaagcatataacacaagttcaatagaagggggtgcaaaccagcaccaccacgaacaagcacttctgtttccccggtgagatcacatagattgttcccacggtcgaaagtgatcagtccgttatccgctcttgtacttcgagaagcctagtaccttcttggaatcttcgatgcgttgcgctcagcactcaaacccagagtgtagcttaggccgatgagtctggacattccccaccggtgacggtggtccaggctgcgttggcggcctacctgtgacccaaagtcacaggacgctagttgtgaacaaggtgagaagagcctattgagctacaagagattcctccggcccctgaatgcggctaatcccaaccatggagcaggtggctgcaaaccagcagacggcctgtcgtaacgcgcaagtccgtggcggaaccgactactttgggtgtccgtgtttcctttattttttattgtggctgcttatggtgacaatcattgattgttatcataaagcgaattggattggccatccagcgataattaaccagaccatttactagtttgttggatttactccactgacattctaaacactcaatctcatagaagtggtgaaattaattggataatttaactaca

SEQ ID NO: 23831 - DNA, 648 bp, synthetic construct
  source 1..648: mol_type = other DNA
cccgtaacttagaagcatataacacaagttcaatagaagggggtgcaaaccagcaccaccacgaacaagcacttctgtttccccggtgagatcacatagattgttcccacggtcgaaagtgatcagtccgttatccgctcttgtacttcgagaagcctagtaccttcttggaatcttcgatgcgttgcgctcagcactcaaacccagagtgtagcttaggccgatgagtctggacattccccaccggtgacggtggtccaggctgcgttggcggcctacctgtgacccaaagtcacaggacgctagttgtgaacaaggtgagaagagcctattgagctacaagagattcctccggcccctgaatgcggctaatcccaaccatggagcaggtggctgcaaaccagcagacggcctgtcgtaacgcgcaagtccgtggcggaaccgactactttgggtgtccgtgtttcctttattttttattgtggctgcttatggtgacaatcattgattgttatcataaagcgaattggattggccatccagcgataattaaccagaccatttactagtttgttggatttactccactgacattctaaacactcaatctcatagaagtggtgaaattaattggataatttaactaca

SEQ ID NO: 23832 - DNA, 598 bp, synthetic construct
  source 1..598: mol_type = other DNA
cagcaccaccacgaacaagcacttctgtttccccggtgagatcacatagattgttcccacggtcgaaagtgatcagtccgttatccgctcttgtacttcgagaagcctagtaccttcttggaatcttcgatgcgttgcgctcagcactcaaacccagagtgtagcttaggccgatgagtctggacattccccaccggtgacggtggtccaggctgcgttggcggcctacctgtgacccaaagtcacaggacgctagttgtgaacaaggtgagaagagcctattgagctacaagagattcctccggcccctgaatgcggctaatcccaaccatggagcaggtggctgcaaaccagcagacggcctgtcgtaacgcgcaagtccgtggcggaaccgactactttgggtgtccgtgtttcctttattttttattgtggctgcttatggtgacaatcattgattgttatcataaagcgaattggattggccatccagcgataattaaccagaccatttactagtttgttggatttactccactgacattctaaacactcaatctcatagaagtggtgaaattaattggataatttaactaca

SEQ ID NO: 23833 - DNA, 548 bp, synthetic construct
  source 1..548: mol_type = other DNA
ttgttcccacggtcgaaagtgatcagtccgttatccgctcttgtacttcgagaagcctagtaccttcttggaatcttcgatgcgttgcgctcagcactcaaacccagagtgtagcttaggccgatgagtctggacattccccaccggtgacggtggtccaggctgcgttggcggcctacctgtgacccaaagtcacaggacgctagttgtgaacaaggtgagaagagcctattgagctacaagagattcctccggcccctgaatgcggctaatcccaaccatggagcaggtggctgcaaaccagcagacggcctgtcgtaacgcgcaagtccgtggcggaaccgactactttgggtgtccgtgtttcctttattttttattgtggctgcttatggtgacaatcattgattgttatcataaagcgaattggattggccatccagcgataattaaccagaccatttactagtttgttggatttactccactgacattctaaacactcaatctcatagaagtggtgaaattaattggataatttaactaca

SEQ ID NO: 23834 - DNA, 698 bp, synthetic construct
  source 1..698: mol_type = other DNA
gtactccggtattacggtacccttgtacgcctgttttatactcccttcccccgcaacttagaagttttacaaaactcgttcaacagaagggggtacaaaccagtaccaccacgaacaagcacttctgtttccccggtgacgttgtatagactgttcccacggtcgaaagcgactgatccgttatccgctctggtacttcgggaagcctagtagcaccttgggatcttcgacgcgttgcgttcaacactcaaccccggagtgtagcttaggtcgatgagtctggacgctcctcaccggcgacggtggtccaggctgcgttggcggcctacctgtggtccaaagccacaggacgctagttgtgaacaaggtgtgaagagcctactgagctacctgagagtcctccggcccctgaatgcggctaatcctaaccacggatcaggtgattgcaaaccagcaattggcctgtcgtaatgcgcaagtctgtggcggaaccgactactttgggtgtccgtgtttccttttattttaaaaatggctgcttatggtgacaatcatagattgttatcataaagcgagttggattggccatccggtgaaagtaaagtatattatctacttgtttgtgggatttactcctataactgcatacacttatcatctcattacgatcacactattgattagatcctgttaccaca

SEQ ID NO: 23835 - DNA, 648 bp, synthetic construct
  source 1..648: mol_type = other DNA
ccgcaacttagaagttttacaaaactcgttcaacagaagggggtacaaaccagtaccaccacgaacaagcacttctgtttccccggtgacgttgtatagactgttcccacggtcgaaagcgactgatccgttatccgctctggtacttcgggaagcctagtagcaccttgggatcttcgacgcgttgcgttcaacactcaaccccggagtgtagcttaggtcgatgagtctggacgctcctcaccggcgacggtggtccaggctgcgttggcggcctacctgtggtccaaagccacaggacgctagttgtgaacaaggtgtgaagagcctactgagctacctgagagtcctccggcccctgaatgcggctaatcctaaccacggatcaggtgattgcaaaccagcaattggcctgtcgtaatgcgcaagtctgtggcggaaccgactactttgggtgtccgtgtttccttttattttaaaaatggctgcttatggtgacaatcatagattgttatcataaagcgagttggattggccatccggtgaaagtaaagtatattatctacttgtttgtgggatttactcctataactgcatacacttatcatctcattacgatcacactattgattagatcctgttaccaca

SEQ ID NO: 23836 - DNA, 598 bp, synthetic construct
  source 1..598: mol_type = other DNA
cagtaccaccacgaacaagcacttctgtttccccggtgacgttgtatagactgttcccacggtcgaaagcgactgatccgttatccgctctggtacttcgggaagcctagtagcaccttgggatcttcgacgcgttgcgttcaacactcaaccccggagtgtagcttaggtcgatgagtctggacgctcctcaccggcgacggtggtccaggctgcgttggcggcctacctgtggtccaaagccacaggacgctagttgtgaacaaggtgtgaagagcctactgagctacctgagagtcctccggcccctgaatgcggctaatcctaaccacggatcaggtgattgcaaaccagcaattggcctgtcgtaatgcgcaagtctgtggcggaaccgactactttgggtgtccgtgtttccttttattttaaaaatggctgcttatggtgacaatcatagattgttatcataaagcgagttggattggccatccggtgaaagtaaagtatattatctacttgtttgtgggatttactcctataactgcatacacttatcatctcattacgatcacactattgattagatcctgttaccaca

SEQ ID NO: 23837 - DNA, 548 bp, synthetic construct
  source 1..548: mol_type = other DNA
ctgttcccacggtcgaaagcgactgatccgttatccgctctggtacttcgggaagcctagtagcaccttgggatcttcgacgcgttgcgttcaacactcaaccccggagtgtagcttaggtcgatgagtctggacgctcctcaccggcgacggtggtccaggctgcgttggcggcctacctgtggtccaaagccacaggacgctagttgtgaacaaggtgtgaagagcctactgagctacctgagagtcctccggcccctgaatgcggctaatcctaaccacggatcaggtgattgcaaaccagcaattggcctgtcgtaatgcgcaagtctgtggcggaaccgactactttgggtgtccgtgtttccttttattttaaaaatggctgcttatggtgacaatcatagattgttatcataaagcgagttggattggccatccggtgaaagtaaagtatattatctacttgtttgtgggatttactcctataactgcatacacttatcatctcattacgatcacactattgattagatcctgttaccaca

SEQ ID NO: 23838 - DNA, 698 bp, synthetic construct
  source 1..698: mol_type = other DNA
gtactctggtatcgcggtacctttgtacgcctgttttatactcccttccccatgtaactttagaagcaattcaccaagttcaatagagggggtacaagccagtaccaccacgaacaagcacttctgttaccccggtgagtttgcataagctgtgcccacggctgaaagtaaatgatccgttatccgcttgagtacttcgagaagcctagtatcaccttggaatcttcgacgcgttgcgctcaacactctaccccgagtgtagcttaggctgatgagtctgggcatcccccaccggcgacggtggcccaggctgcgttggcggcctacccatggccaacgccatgggacgctagttgtgaacaaggtgtgaagagcctattgagctactcaagagtcctccggcccctgaatgcggctaatcctaaccatggagcaagtggccccaacccaggggatggcttgtcgtaacgcgcaagtccgtggcggaaccgactactttgggtgtccgtgtttccttttattttatatatggctgcttatggtgacaatcacagattgttatcataaagcgaattggattggccatccggtgaaatataagcacattatttatatctttgctggattcgctccgttgacacattcttcaccaaagttgatttatacagtcttagtaattagaaatcaccacttcagtc

SEQ ID NO: 23839 - DNA, 648 bp, synthetic construct
  source 1..648: mol_type = other DNA
catgtaactttagaagcaattcaccaagttcaatagagggggtacaagccagtaccaccacgaacaagcacttctgttaccccggtgagtttgcataagctgtgcccacggctgaaagtaaatgatccgttatccgcttgagtacttcgagaagcctagtatcaccttggaatcttcgacgcgttgcgctcaacactctaccccgagtgtagcttaggctgatgagtctgggcatcccccaccggcgacggtggcccaggctgcgttggcggcctacccatggccaacgccatgggacgctagttgtgaacaaggtgtgaagagcctattgagctactcaagagtcctccggcccctgaatgcggctaatcctaaccatggagcaagtggccccaacccaggggatggcttgtcgtaacgcgcaagtccgtggcggaaccgactactttgggtgtccgtgtttccttttattttatatatggctgcttatggtgacaatcacagattgttatcataaagcgaattggattggccatccggtgaaatataagcacattatttatatctttgctggattcgctccgttgacacattcttcaccaaagttgatttatacagtcttagtaattagaaatcaccacttcagtc

SEQ ID NO: 23840 - DNA, 598 bp, synthetic construct
  source 1..598: mol_type = other DNA
agtaccaccacgaacaagcacttctgttaccccggtgagtttgcataagctgtgcccacggctgaaagtaaatgatccgttatccgcttgagtacttcgagaagcctagtatcaccttggaatcttcgacgcgttgcgctcaacactctaccccgagtgtagcttaggctgatgagtctgggcatcccccaccggcgacggtggcccaggctgcgttggcggcctacccatggccaacgccatgggacgctagttgtgaacaaggtgtgaagagcctattgagctactcaagagtcctccggcccctgaatgcggctaatcctaaccatggagcaagtggccccaacccaggggatggcttgtcgtaacgcgcaagtccgtggcggaaccgactactttgggtgtccgtgtttccttttattttatatatggctgcttatggtgacaatcacagattgttatcataaagcgaattggattggccatccggtgaaatataagcacattatttatatctttgctggattcgctccgttgacacattcttcaccaaagttgatttatacagtcttagtaattagaaatcaccacttcagtc

SEQ ID NO: 23841 - DNA, 548 bp, synthetic construct
  source 1..548: mol_type = other DNA
tgtgcccacggctgaaagtaaatgatccgttatccgcttgagtacttcgagaagcctagtatcaccttggaatcttcgacgcgttgcgctcaacactctaccccgagtgtagcttaggctgatgagtctgggcatcccccaccggcgacggtggcccaggctgcgttggcggcctacccatggccaacgccatgggacgctagttgtgaacaaggtgtgaagagcctattgagctactcaagagtcctccggcccctgaatgcggctaatcctaaccatggagcaagtggccccaacccaggggatggcttgtcgtaacgcgcaagtccgtggcggaaccgactactttgggtgtccgtgtttccttttattttatatatggctgcttatggtgacaatcacagattgttatcataaagcgaattggattggccatccggtgaaatataagcacattatttatatctttgctggattcgctccgttgacacattcttcaccaaagttgatttatacagtcttagtaattagaaatcaccacttcagtc

SEQ ID NO: 23842 - DNA, 698 bp, synthetic construct
  source 1..698: mol_type = other DNA
gtactccggtattacggtacccttgtacgcctgttttatactcccttcccctgtaacttagaagcaccgaacacaagttcaatagaagggggtacaaaccagtaccaccacgaacaagcacttctgtttccccggtgaagttgtattaaactgttcccacggttgaaagcggctgatccgttatccgctcatgtacttcgggaagcctagtaccatcttggaatcttcgatgcgttgcgctcagcactcaaccccagagtgtagcttaggtcgatgagtctggacaaacctcactggcgacagtggtccaggctgcgttggcggcctacctgtggcccaaagccacaggacgctagttgtgaacaaggtgtgaagagcctactgagctacatgagagtcctccggcccctgaatgcggccaatcccaaccacggagcaggcgactacaagccagtggttagtctgtcgtaatgcgcaagtctgtggcggaaccgactactttgggtgtccgtgtttccttttattttgacattggctgcttatggtgacaatcatagattgttatcataaagcgaattggattggccatccggtgagagtcaaaactattatctacctttttattggatttactccactgaacgcttataccccagtccttattagacttgcattgttgattagatatcactattata

SEQ ID NO: 23843 - DNA, 648 bp, synthetic construct
  source 1..648: mol_type = other DNA
ctgtaacttagaagcaccgaacacaagttcaatagaagggggtacaaaccagtaccaccacgaacaagcacttctgtttccccggtgaagttgtattaaactgttcccacggttgaaagcggctgatccgttatccgctcatgtacttcgggaagcctagtaccatcttggaatcttcgatgcgttgcgctcagcactcaaccccagagtgtagcttaggtcgatgagtctggacaaacctcactggcgacagtggtccaggctgcgttggcggcctacctgtggcccaaagccacaggacgctagttgtgaacaaggtgtgaagagcctactgagctacatgagagtcctccggcccctgaatgcggccaatcccaaccacggagcaggcgactacaagccagtggttagtctgtcgtaatgcgcaagtctgtggcggaaccgactactttgggtgtccgtgtttccttttattttgacattggctgcttatggtgacaatcatagattgttatcataaagcgaattggattggccatccggtgagagtcaaaactattatctacctttttattggatttactccactgaacgcttataccccagtccttattagacttgcattgttgattagatatcactattata

SEQ ID NO: 23844 - DNA, 598 bp, synthetic construct
  source 1..598: mol_type = other DNA
agtaccaccacgaacaagcacttctgtttccccggtgaagttgtattaaactgttcccacggttgaaagcggctgatccgttatccgctcatgtacttcgggaagcctagtaccatcttggaatcttcgatgcgttgcgctcagcactcaaccccagagtgtagcttaggtcgatgagtctggacaaacctcactggcgacagtggtccaggctgcgttggcggcctacctgtggcccaaagccacaggacgctagttgtgaacaaggtgtgaagagcctactgagctacatgagagtcctccggcccctgaatgcggccaatcccaaccacggagcaggcgactacaagccagtggttagtctgtcgtaatgcgcaagtctgtggcggaaccgactactttgggtgtccgtgtttccttttattttgacattggctgcttatggtgacaatcatagattgttatcataaagcgaattggattggccatccggtgagagtcaaaactattatctacctttttattggatttactccactgaacgcttataccccagtccttattagacttgcattgttgattagatatcactattata

SEQ ID NO: 23845 - DNA, 548 bp, synthetic construct
  source 1..548: mol_type = other DNA
ctgttcccacggttgaaagcggctgatccgttatccgctcatgtacttcgggaagcctagtaccatcttggaatcttcgatgcgttgcgctcagcactcaaccccagagtgtagcttaggtcgatgagtctggacaaacctcactggcgacagtggtccaggctgcgttggcggcctacctgtggcccaaagccacaggacgctagttgtgaacaaggtgtgaagagcctactgagctacatgagagtcctccggcccctgaatgcggccaatcccaaccacggagcaggcgactacaagccagtggttagtctgtcgtaatgcgcaagtctgtggcggaaccgactactttgggtgtccgtgtttccttttattttgacattggctgcttatggtgacaatcatagattgttatcataaagcgaattggattggccatccggtgagagtcaaaactattatctacctttttattggatttactccactgaacgcttataccccagtccttattagacttgcattgttgattagatatcactattata

SEQ ID NO: 23846 - DNA, 698 bp, synthetic construct
  source 1..698: mol_type = other DNA
gcactccggtattacggtacccttgtgcgcctgttttatactccctctcccgcaacttagaagcacgaaaccaagttcaatagaagggggtacaaaccagtaccaccacgaacaagcacctctgtttccccggtgacattgcatagactgctcacgcggttgaaagtgatcgatccgttacccgcttgtgtacttcgaaaagcctagtatcgccttggaatcttcgacgcgttgcgctcagcacccgaccccggggtgtagcttaggctgatgagtctggacattcctcaccggtgacggtggtccaggctgcgttggcggcctacctatggctaacgccataggacgctagttgtgaacaaggtgtgaagagcctattgagctacataagagtcctccggcccctgaatgcggctaatcctaaccacggagcaggcggtcgcgaaccagtgactggcttgtcgtaacgcgcaagtctgtggcggaaccgactactttgggtgtccgtgtttcctgttatttttatcatggctgcttatggtgacaatcagagattgttatcataaagcgaattggattggccatccggtgagtgttgtgtcaggtatacaaccgtttgttggaaccactgtgttagctttacttctcatttaaccagttaatcaaaaacaatacgaggacaaaacaacaatactaca

SEQ ID NO: 23847 - DNA, 648 bp, synthetic construct
  source 1..648: mol_type = other DNA
cgcaacttagaagcacgaaaccaagttcaatagaagggggtacaaaccagtaccaccacgaacaagcacctctgtttccccggtgacattgcatagactgctcacgcggttgaaagtgatcgatccgttacccgcttgtgtacttcgaaaagcctagtatcgccttggaatcttcgacgcgttgcgctcagcacccgaccccggggtgtagcttaggctgatgagtctggacattcctcaccggtgacggtggtccaggctgcgttggcggcctacctatggctaacgccataggacgctagttgtgaacaaggtgtgaagagcctattgagctacataagagtcctccggcccctgaatgcggctaatcctaaccacggagcaggcggtcgcgaaccagtgactggcttgtcgtaacgcgcaagtctgtggcggaaccgactactttgggtgtccgtgtttcctgttatttttatcatggctgcttatggtgacaatcagagattgttatcataaagcgaattggattggccatccggtgagtgttgtgtcaggtatacaaccgtttgttggaaccactgtgttagctttacttctcatttaaccagttaatcaaaaacaatacgaggacaaaacaacaatactaca

SEQ ID NO: 23848 - DNA, 598 bp, synthetic construct
  source 1..598: mol_type = other DNA
taccaccacgaacaagcacctctgtttccccggtgacattgcatagactgctcacgcggttgaaagtgatcgatccgttacccgcttgtgtacttcgaaaagcctagtatcgccttggaatcttcgacgcgttgcgctcagcacccgaccccggggtgtagcttaggctgatgagtctggacattcctcaccggtgacggtggtccaggctgcgttggcggcctacctatggctaacgccataggacgctagttgtgaacaaggtgtgaagagcctattgagctacataagagtcctccggcccctgaatgcggctaatcctaaccacggagcaggcggtcgcgaaccagtgactggcttgtcgtaacgcgcaagtctgtggcggaaccgactactttgggtgtccgtgtttcctgttatttttatcatggctgcttatggtgacaatcagagattgttatcataaagcgaattggattggccatccggtgagtgttgtgtcaggtatacaaccgtttgttggaaccactgtgttagctttacttctcatttaaccagttaatcaaaaacaatacgaggacaaaacaacaatactaca

SEQ ID NO: 23849 - DNA, 548 bp, synthetic construct
  source 1..548: mol_type = other DNA
ctcacgcggttgaaagtgatcgatccgttacccgcttgtgtacttcgaaaagcctagtatcgccttggaatcttcgacgcgttgcgctcagcacccgaccccggggtgtagcttaggctgatgagtctggacattcctcaccggtgacggtggtccaggctgcgttggcggcctacctatggctaacgccataggacgctagttgtgaacaaggtgtgaagagcctattgagctacataagagtcctccggcccctgaatgcggctaatcctaaccacggagcaggcggtcgcgaaccagtgactggcttgtcgtaacgcgcaagtctgtggcggaaccgactactttgggtgtccgtgtttcctgttatttttatcatggctgcttatggtgacaatcagagattgttatcataaagcgaattggattggccatccggtgagtgttgtgtcaggtatacaaccgtttgttggaaccactgtgttagctttacttctcatttaaccagttaatcaaaaacaatacgaggacaaaacaacaatactaca

SEQ ID NO: 23850 - DNA, 698 bp, synthetic construct
  source 1..698: mol_type = other DNA
tactccggtattacggtacccttgtacgcctgttttatactcccttccccgcaacttagaagaattaaaccaagttcaatagaagggggtacaagccagtaccaccacgaacaagcacttctgtttccccggtgacgccgtatagactgtacccacggttgaaaacgactgatccgttatccgctttcgtacttcgagaagcctagtatcatcttgggatcatcgatgcgttgcgctcagcactcaaccccggggtgtagcttaggccgatgagtctggacattcctcaccggtgacggtggtccaggctgcgttggcggcctacctgtggcccaaagccacaggacgctagttgtgaacaaggtgtgaagagcctattgagctacgaaagattcctccggcccctgaatgcggctaatcccaaccacggagcaagtgctcgcacaccagtgagtagcttgtcgtaacgggtaactctgtggcggaaccgactactttgggtgtccgtgtttcctgttatttttatcatggctgcttatggtgacaatcagagattgttatcataaagcgaattggattggccatccggtgagcgttgtgtcaggtatacaactgtttgttggaaccactgtgttagctttacttctcatttaaccaatttatcaaaaataatacgaggataaaacaacaatactaca

SEQ ID NO: 23851 - DNA, 648 bp, synthetic construct
  source 1..648: mol_type = other DNA
gcaacttagaagaattaaaccaagttcaatagaagggggtacaagccagtaccaccacgaacaagcacttctgtttccccggtgacgccgtatagactgtacccacggttgaaaacgactgatccgttatccgctttcgtacttcgagaagcctagtatcatcttgggatcatcgatgcgttgcgctcagcactcaaccccggggtgtagcttaggccgatgagtctggacattcctcaccggtgacggtggtccaggctgcgttggcggcctacctgtggcccaaagccacaggacgctagttgtgaacaaggtgtgaagagcctattgagctacgaaagattcctccggcccctgaatgcggctaatcccaaccacggagcaagtgctcgcacaccagtgagtagcttgtcgtaacgggtaactctgtggcggaaccgactactttgggtgtccgtgtttcctgttatttttatcatggctgcttatggtgacaatcagagattgttatcataaagcgaattggattggccatccggtgagcgttgtgtcaggtatacaactgtttgttggaaccactgtgttagctttacttctcatttaaccaatttatcaaaaataatacgaggataaaacaacaatactaca

SEQ ID NO: 23852 - DNA, 598 bp, synthetic construct
  source 1..598: mol_type = other DNA
accaccacgaacaagcacttctgtttccccggtgacgccgtatagactgtacccacggttgaaaacgactgatccgttatccgctttcgtacttcgagaagcctagtatcatcttgggatcatcgatgcgttgcgctcagcactcaaccccggggtgtagcttaggccgatgagtctggacattcctcaccggtgacggtggtccaggctgcgttggcggcctacctgtggcccaaagccacaggacgctagttgtgaacaaggtgtgaagagcctattgagctacgaaagattcctccggcccctgaatgcggctaatcccaaccacggagcaagtgctcgcacaccagtgagtagcttgtcgtaacgggtaactctgtggcggaaccgactactttgggtgtccgtgtttcctgttatttttatcatggctgcttatggtgacaatcagagattgttatcataaagcgaattggattggccatccggtgagcgttgtgtcaggtatacaactgtttgttggaaccactgtgttagctttacttctcatttaaccaatttatcaaaaataatacgaggataaaacaacaatactaca

SEQ ID NO: 23853 - DNA, 548 bp, synthetic construct
  source 1..548: mol_type = other DNA
acccacggttgaaaacgactgatccgttatccgctttcgtacttcgagaagcctagtatcatcttgggatcatcgatgcgttgcgctcagcactcaaccccggggtgtagcttaggccgatgagtctggacattcctcaccggtgacggtggtccaggctgcgttggcggcctacctgtggcccaaagccacaggacgctagttgtgaacaaggtgtgaagagcctattgagctacgaaagattcctccggcccctgaatgcggctaatcccaaccacggagcaagtgctcgcacaccagtgagtagcttgtcgtaacgggtaactctgtggcggaaccgactactttgggtgtccgtgtttcctgttatttttatcatggctgcttatggtgacaatcagagattgttatcataaagcgaattggattggccatccggtgagcgttgtgtcaggtatacaactgtttgttggaaccactgtgttagctttacttctcatttaaccaatttatcaaaaataatacgaggataaaacaacaatactaca

SEQ ID NO: 23854 - DNA, 698 bp, synthetic construct
  source 1..698: mol_type = other DNA
agtactccggtatcacggtacccttgtacgcctgttttatactcccttcccccgtaacttagaagagttaaaccaagttcaatagaagggggtacaaaccagtaccaccacgaacaagcacttctgtttccccggtgatattgtatagactgtacccacggtcgaaaatgattgatccgttatccgctctcatacttcgagaagcctagtatcatcttggaatcttcgatgcgttgcgctcggcactcgatcccggagtgtagcttaggtcgatgagtctggacactcctcaccggtgacggtggtccagactgcgttggcggcctacctgtggtccaaagccacaggacgctagttgtgaacaaggtgtgaagagcctattgagctatgagagagtcctccggcccctgaatgcggctaatcccaaccacggagcgagagtgcgcaagccagcgtatatctcgtcgtaacgcgcaagtctgtggcggaaccgactactttgggtgtccgtgtttccttttatttttgtattggctgcttatggtgacaatcacagattgttatcataaagcgaattggattggccatccggtgaaagtgaaatacattatttgcttatttattggattcagtccacctaattgctatactcacgaacccaccacagccgttttgttaactgaaagccggtaccaata

SEQ ID NO: 23855 - DNA, 648 bp, synthetic construct
  source 1..648: mol_type = other DNA
cccgtaacttagaagagttaaaccaagttcaatagaagggggtacaaaccagtaccaccacgaacaagcacttctgtttccccggtgatattgtatagactgtacccacggtcgaaaatgattgatccgttatccgctctcatacttcgagaagcctagtatcatcttggaatcttcgatgcgttgcgctcggcactcgatcccggagtgtagcttaggtcgatgagtctggacactcctcaccggtgacggtggtccagactgcgttggcggcctacctgtggtccaaagccacaggacgctagttgtgaacaaggtgtgaagagcctattgagctatgagagagtcctccggcccctgaatgcggctaatcccaaccacggagcgagagtgcgcaagccagcgtatatctcgtcgtaacgcgcaagtctgtggcggaaccgactactttgggtgtccgtgtttccttttatttttgtattggctgcttatggtgacaatcacagattgttatcataaagcgaattggattggccatccggtgaaagtgaaatacattatttgcttatttattggattcagtccacctaattgctatactcacgaacccaccacagccgttttgttaactgaaagccggtaccaata

SEQ ID NO: 23856 - DNA, 598 bp, synthetic construct
  source 1..598: mol_type = other DNA
agtaccaccacgaacaagcacttctgtttccccggtgatattgtatagactgtacccacggtcgaaaatgattgatccgttatccgctctcatacttcgagaagcctagtatcatcttggaatcttcgatgcgttgcgctcggcactcgatcccggagtgtagcttaggtcgatgagtctggacactcctcaccggtgacggtggtccagactgcgttggcggcctacctgtggtccaaagccacaggacgctagttgtgaacaaggtgtgaagagcctattgagctatgagagagtcctccggcccctgaatgcggctaatcccaaccacggagcgagagtgcgcaagccagcgtatatctcgtcgtaacgcgcaagtctgtggcggaaccgactactttgggtgtccgtgtttccttttatttttgtattggctgcttatggtgacaatcacagattgttatcataaagcgaattggattggccatccggtgaaagtgaaatacattatttgcttatttattggattcagtccacctaattgctatactcacgaacccaccacagccgttttgttaactgaaagccggtaccaata

SEQ ID NO: 23857 - DNA, 548 bp, synthetic construct
  source 1..548: mol_type = other DNA
tgtacccacggtcgaaaatgattgatccgttatccgctctcatacttcgagaagcctagtatcatcttggaatcttcgatgcgttgcgctcggcactcgatcccggagtgtagcttaggtcgatgagtctggacactcctcaccggtgacggtggtccagactgcgttggcggcctacctgtggtccaaagccacaggacgctagttgtgaacaaggtgtgaagagcctattgagctatgagagagtcctccggcccctgaatgcggctaatcccaaccacggagcgagagtgcgcaagccagcgtatatctcgtcgtaacgcgcaagtctgtggcggaaccgactactttgggtgtccgtgtttccttttatttttgtattggctgcttatggtgacaatcacagattgttatcataaagcgaattggattggccatccggtgaaagtgaaatacattatttgcttatttattggattcagtccacctaattgctatactcacgaacccaccacagccgttttgttaactgaaagccggtaccaata

SEQ ID NO: 23858 - DNA, 698 bp, synthetic construct
  source 1..698: mol_type = other DNA
ggctagtactctggtatcatggtacctttgtacgcctgttttatacccctaccccacgtaactttagaagcaactcaacaagttcaatagggggggtacaaaccagtaccaccacgaacaagcactcctgttaccccggtgatcttgcataagctgtgcccacggctgaaggcgagagatccgttatccgcttgagtacttcgagaagcctagtatcaccttgggatcttcgacgcgttgcgctcagcactccacccgagtgtagcttaggctgatgagcctgggcattccccaccggcgacggtggcccaggctgcgttggcggcctacccatggctaacaccatgggacgctagatgtgaacaaggtgtgaagagcctattgagctactcaagagtcctccggcccctgaatgcggctaatcccaaccacggagcaggtgtcttcaacccagaaggtagcctgtcgtaacgcgtaagtctgtggcggaaccgactactttgggtgtccgtgtttccttttatcttttatatggctgcttatggtgacaatcacagattgttatcataaagcgatttggattggccatccggtgaagtacaaacacattatctacttgtttgttggatttactccactcacacaccccacccccaatataacatctattgttttgttaacaagaaattactttcgaa

SEQ ID NO: 23859 - DNA, 648 bp, synthetic construct
  source 1..648: mol_type = other DNA
accccacgtaactttagaagcaactcaacaagttcaatagggggggtacaaaccagtaccaccacgaacaagcactcctgttaccccggtgatcttgcataagctgtgcccacggctgaaggcgagagatccgttatccgcttgagtacttcgagaagcctagtatcaccttgggatcttcgacgcgttgcgctcagcactccacccgagtgtagcttaggctgatgagcctgggcattccccaccggcgacggtggcccaggctgcgttggcggcctacccatggctaacaccatgggacgctagatgtgaacaaggtgtgaagagcctattgagctactcaagagtcctccggcccctgaatgcggctaatcccaaccacggagcaggtgtcttcaacccagaaggtagcctgtcgtaacgcgtaagtctgtggcggaaccgactactttgggtgtccgtgtttccttttatcttttatatggctgcttatggtgacaatcacagattgttatcataaagcgatttggattggccatccggtgaagtacaaacacattatctacttgtttgttggatttactccactcacacaccccacccccaatataacatctattgttttgttaacaagaaattactttcgaa

SEQ ID NO: 23860 - DNA, 598 bp, synthetic construct
  source 1..598: mol_type = other DNA
aaccagtaccaccacgaacaagcactcctgttaccccggtgatcttgcataagctgtgcccacggctgaaggcgagagatccgttatccgcttgagtacttcgagaagcctagtatcaccttgggatcttcgacgcgttgcgctcagcactccacccgagtgtagcttaggctgatgagcctgggcattccccaccggcgacggtggcccaggctgcgttggcggcctacccatggctaacaccatgggacgctagatgtgaacaaggtgtgaagagcctattgagctactcaagagtcctccggcccctgaatgcggctaatcccaaccacggagcaggtgtcttcaacccagaaggtagcctgtcgtaacgcgtaagtctgtggcggaaccgactactttgggtgtccgtgtttccttttatcttttatatggctgcttatggtgacaatcacagattgttatcataaagcgatttggattggccatccggtgaagtacaaacacattatctacttgtttgttggatttactccactcacacaccccacccccaatataacatctattgttttgttaacaagaaattactttcgaa

SEQ ID NO: 23861 - DNA, 548 bp, synthetic construct
  source 1..548: mol_type = other DNA
aagctgtgcccacggctgaaggcgagagatccgttatccgcttgagtacttcgagaagcctagtatcaccttgggatcttcgacgcgttgcgctcagcactccacccgagtgtagcttaggctgatgagcctgggcattccccaccggcgacggtggcccaggctgcgttggcggcctacccatggctaacaccatgggacgctagatgtgaacaaggtgtgaagagcctattgagctactcaagagtcctccggcccctgaatgcggctaatcccaaccacggagcaggtgtcttcaacccagaaggtagcctgtcgtaacgcgtaagtctgtggcggaaccgactactttgggtgtccgtgtttccttttatcttttatatggctgcttatggtgacaatcacagattgttatcataaagcgatttggattggccatccggtgaagtacaaacacattatctacttgtttgttggatttactccactcacacaccccacccccaatataacatctattgttttgttaacaagaaattactttcgaa

SEQ ID NO: 23862 - DNA, 699 bp, synthetic construct
  source 1..699: mol_type = other DNA
agcactctggtatcacggtacctttgtgcgcctgttttatatccctttccccatgcaacttagaagttttttaaacaaagttcaatagaagggggtacaaaccagtgccaccacgaacaagcacttctgtttccccggtgaagctgcatagactgtccccacggttgaaagcggcagatccgtcatccgctttggtacttcgagaaacctagtatcaccttggaatcttcgatgcgttgcgctcagcactcaaccccagagtgtagcttaggttgatgagtctggacaatcctcactggcgacagtggtccaggctgcgttggcggcctacctgtggtgaaaaccacaggacgctagatgtgaacaaggtgtgaagagtctattgagctaccaaagagtcctccggcccctgaatgcggctaatcctaaccacggagcaagtacccacaaaccagtgggcagcttgtcgtaacgcgcaagtctgtggcggaaccgactactttgggtgtccgtgtttcctttttattttatcatggctgcttatggtgacaatctaagattgttatcatatagctattggattggccatccggtgactaacagagatattatatacctatttgttggttttgttagattaaatactatcacattcaaaactcttctttatatcatacaattgaacagtagaaagagaaa

SEQ ID NO: 23863 - DNA, 649 bp, synthetic construct
  source 1..649: mol_type = other DNA
ccatgcaacttagaagttttttaaacaaagttcaatagaagggggtacaaaccagtgccaccacgaacaagcacttctgtttccccggtgaagctgcatagactgtccccacggttgaaagcggcagatccgtcatccgctttggtacttcgagaaacctagtatcaccttggaatcttcgatgcgttgcgctcagcactcaaccccagagtgtagcttaggttgatgagtctggacaatcctcactggcgacagtggtccaggctgcgttggcggcctacctgtggtgaaaaccacaggacgctagatgtgaacaaggtgtgaagagtctattgagctaccaaagagtcctccggcccctgaatgcggctaatcctaaccacggagcaagtacccacaaaccagtgggcagcttgtcgtaacgcgcaagtctgtggcggaaccgactactttgggtgtccgtgtttcctttttattttatcatggctgcttatggtgacaatctaagattgttatcatatagctattggattggccatccggtgactaacagagatattatatacctatttgttggttttgttagattaaatactatcacattcaaaactcttctttatatcatacaattgaacagtagaaagagaaa

SEQ ID NO: 23864 - DNA, 599 bp, synthetic construct
  source 1..599: mol_type = other DNA
accagtgccaccacgaacaagcacttctgtttccccggtgaagctgcatagactgtccccacggttgaaagcggcagatccgtcatccgctttggtacttcgagaaacctagtatcaccttggaatcttcgatgcgttgcgctcagcactcaaccccagagtgtagcttaggttgatgagtctggacaatcctcactggcgacagtggtccaggctgcgttggcggcctacctgtggtgaaaaccacaggacgctagatgtgaacaaggtgtgaagagtctattgagctaccaaagagtcctccggcccctgaatgcggctaatcctaaccacggagcaagtacccacaaaccagtgggcagcttgtcgtaacgcgcaagtctgtggcggaaccgactactttgggtgtccgtgtttcctttttattttatcatggctgcttatggtgacaatctaagattgttatcatatagctattggattggccatccggtgactaacagagatattatatacctatttgttggttttgttagattaaatactatcacattcaaaactcttctttatatcatacaattgaacagtagaaagagaaa

SEQ ID NO: 23865 - DNA, 549 bp, synthetic construct
  source 1..549: mol_type = other DNA
gactgtccccacggttgaaagcggcagatccgtcatccgctttggtacttcgagaaacctagtatcaccttggaatcttcgatgcgttgcgctcagcactcaaccccagagtgtagcttaggttgatgagtctggacaatcctcactggcgacagtggtccaggctgcgttggcggcctacctgtggtgaaaaccacaggacgctagatgtgaacaaggtgtgaagagtctattgagctaccaaagagtcctccggcccctgaatgcggctaatcctaaccacggagcaagtacccacaaaccagtgggcagcttgtcgtaacgcgcaagtctgtggcggaaccgactactttgggtgtccgtgtttcctttttattttatcatggctgcttatggtgacaatctaagattgttatcatatagctattggattggccatccggtgactaacagagatattatatacctatttgttggttttgttagattaaatactatcacattcaaaactcttctttatatcatacaattgaacagtagaaagagaaa

SEQ ID NO: 23866 - DNA, 699 bp, synthetic construct
  source 1..699: mol_type = other DNA
cactctgatttcacgaaatccttgtgcgcctgttttatatcccttccccccagtctgaaacatagaagcaatgcgcatcactgatcaatagcaggcgtaacgcgccagttacgtcatgatcaagcacatctgtctccccggaccgagtatcaatagactgcttgcgcggttgaaggagaaacagttcgttacccggctaactacttcgagaagcccagtagcaccatggaagctgcagggtgtttcgctcagcacttcccccgtgtagatcaggtcgatgagtcactgcaacccccacaggcgactgtggcagtggctgcgttggcggcctgcctatggggagacccataggacgctctaatgtggacatggtgtgaagagcctattgagctagttagtagtcctccggcccctgaatgcggctaatcctaactgcggagcacacgccctcaacccagagggtagtgtgtcgtaacgggcaactctgcagcggaaccgactactttgggtgtccgtgtttcttattattcttatattggctgcttatggtgacaattacagaattgttaccatatagctattggattggccatccggtgtgcaatagagctgttatatacctatttgttggttttgtgccactgactttaaaatctatagttactcttaatttcatattggctctcaacacaattaaac

SEQ ID NO: 23867 - DNA, 649 bp, synthetic construct
  source 1..649: mol_type = other DNA
cagtctgaaacatagaagcaatgcgcatcactgatcaatagcaggcgtaacgcgccagttacgtcatgatcaagcacatctgtctccccggaccgagtatcaatagactgcttgcgcggttgaaggagaaacagttcgttacccggctaactacttcgagaagcccagtagcaccatggaagctgcagggtgtttcgctcagcacttcccccgtgtagatcaggtcgatgagtcactgcaacccccacaggcgactgtggcagtggctgcgttggcggcctgcctatggggagacccataggacgctctaatgtggacatggtgtgaagagcctattgagctagttagtagtcctccggcccctgaatgcggctaatcctaactgcggagcacacgccctcaacccagagggtagtgtgtcgtaacgggcaactctgcagcggaaccgactactttgggtgtccgtgtttcttattattcttatattggctgcttatggtgacaattacagaattgttaccatatagctattggattggccatccggtgtgcaatagagctgttatatacctatttgttggttttgtgccactgactttaaaatctatagttactcttaatttcatattggctctcaacacaattaaac

SEQ ID NO: 23868 - DNA, 599 bp, synthetic construct
  source 1..599: mol_type = other DNA
cgcgccagttacgtcatgatcaagcacatctgtctccccggaccgagtatcaatagactgcttgcgcggttgaaggagaaacagttcgttacccggctaactacttcgagaagcccagtagcaccatggaagctgcagggtgtttcgctcagcacttcccccgtgtagatcaggtcgatgagtcactgcaacccccacaggcgactgtggcagtggctgcgttggcggcctgcctatggggagacccataggacgctctaatgtggacatggtgtgaagagcctattgagctagttagtagtcctccggcccctgaatgcggctaatcctaactgcggagcacacgccctcaacccagagggtagtgtgtcgtaacgggcaactctgcagcggaaccgactactttgggtgtccgtgtttcttattattcttatattggctgcttatggtgacaattacagaattgttaccatatagctattggattggccatccggtgtgcaatagagctgttatatacctatttgttggttttgtgccactgactttaaaatctatagttactcttaatttcatattggctctcaacacaattaaac

SEQ ID NO: 23869 - DNA, 549 bp, synthetic construct
  source 1..549: mol_type = other DNA
caatagactgcttgcgcggttgaaggagaaacagttcgttacccggctaactacttcgagaagcccagtagcaccatggaagctgcagggtgtttcgctcagcacttcccccgtgtagatcaggtcgatgagtcactgcaacccccacaggcgactgtggcagtggctgcgttggcggcctgcctatggggagacccataggacgctctaatgtggacatggtgtgaagagcctattgagctagttagtagtcctccggcccctgaatgcggctaatcctaactgcggagcacacgccctcaacccagagggtagtgtgtcgtaacgggcaactctgcagcggaaccgactactttgggtgtccgtgtttcttattattcttatattggctgcttatggtgacaattacagaattgttaccatatagctattggattggccatccggtgtgcaatagagctgttatatacctatttgttggttttgtgccactgactttaaaatctatagttactcttaatttcatattggctctcaacacaattaaac

SEQ ID NO: 23870 - DNA, 699 bp, synthetic construct
  source 1..699: mol_type = other DNA
cactctggtattacggtacctttgtgcgcctgttttatgccccttaccccttaaattggtaacttagaagttttacatacctgcgaccaatagcgggcatgacgcaccagccatgtcttggtcaagcacttctgttcccccggactgagtatcaatagactgctcacgcggtcgaaggagaaaacgttcgttatccggctggctacttcgagaaacccagtaacaccatgaaagttgcagagtgtttcgctcagcactacccccgtgtagatcaggtcgatgagtcactgcgaaccccacgggcgaccgtggcagtggctgcgctggcggcctgcccatggggtgacccatgggacgctctaatacagacatggtgtgaagagtctattgagctagtcagtagtcctccggcccctgaatgcggctaatcctaactgcggagcacatgccctcaatccagggggtggtgtgtcgtaacgggtaactctgcagcggaaccgactactttgggtgtccgtgtttccttttattcctatcatggctgcttatggtgacaattgaaagattgttaccatatagctactggattggccacccggtgtctaacagagctattgtttatctatttgttgggtacgtccttcttgactataaggcccttcagactcttaagtacatcttgtacctcaatcaaaagag

SEQ ID NO: 23871 - DNA, 649 bp, synthetic construct
  source 1..649: mol_type = other DNA
ttaaattggtaacttagaagttttacatacctgcgaccaatagcgggcatgacgcaccagccatgtcttggtcaagcacttctgttcccccggactgagtatcaatagactgctcacgcggtcgaaggagaaaacgttcgttatccggctggctacttcgagaaacccagtaacaccatgaaagttgcagagtgtttcgctcagcactacccccgtgtagatcaggtcgatgagtcactgcgaaccccacgggcgaccgtggcagtggctgcgctggcggcctgcccatggggtgacccatgggacgctctaatacagacatggtgtgaagagtctattgagctagtcagtagtcctccggcccctgaatgcggctaatcctaactgcggagcacatgccctcaatccagggggtggtgtgtcgtaacgggtaactctgcagcggaaccgactactttgggtgtccgtgtttccttttattcctatcatggctgcttatggtgacaattgaaagattgttaccatatagctactggattggccacccggtgtctaacagagctattgtttatctatttgttgggtacgtccttcttgactataaggcccttcagactcttaagtacatcttgtacctcaatcaaaagag

SEQ ID NO: 23872 - DNA, 599 bp, synthetic construct
  source 1..599: mol_type = other DNA
gacgcaccagccatgtcttggtcaagcacttctgttcccccggactgagtatcaatagactgctcacgcggtcgaaggagaaaacgttcgttatccggctggctacttcgagaaacccagtaacaccatgaaagttgcagagtgtttcgctcagcactacccccgtgtagatcaggtcgatgagtcactgcgaaccccacgggcgaccgtggcagtggctgcgctggcggcctgcccatggggtgacccatgggacgctctaatacagacatggtgtgaagagtctattgagctagtcagtagtcctccggcccctgaatgcggctaatcctaactgcggagcacatgccctcaatccagggggtggtgtgtcgtaacgggtaactctgcagcggaaccgactactttgggtgtccgtgtttccttttattcctatcatggctgcttatggtgacaattgaaagattgttaccatatagctactggattggccacccggtgtctaacagagctattgtttatctatttgttgggtacgtccttcttgactataaggcccttcagactcttaagtacatcttgtacctcaatcaaaagag

SEQ ID NO: 23873 - DNA, 549 bp, synthetic construct
  source 1..549: mol_type = other DNA
atcaatagactgctcacgcggtcgaaggagaaaacgttcgttatccggctggctacttcgagaaacccagtaacaccatgaaagttgcagagtgtttcgctcagcactacccccgtgtagatcaggtcgatgagtcactgcgaaccccacgggcgaccgtggcagtggctgcgctggcggcctgcccatggggtgacccatgggacgctctaatacagacatggtgtgaagagtctattgagctagtcagtagtcctccggcccctgaatgcggctaatcctaactgcggagcacatgccctcaatccagggggtggtgtgtcgtaacgggtaactctgcagcggaaccgactactttgggtgtccgtgtttccttttattcctatcatggctgcttatggtgacaattgaaagattgttaccatatagctactggattggccacccggtgtctaacagagctattgtttatctatttgttgggtacgtccttcttgactataaggcccttcagactcttaagtacatcttgtacctcaatcaaaagag

SEQ ID NO: 23874 - DNA, 699 bp, synthetic construct
  source 1..699: mol_type = other DNA
cactctgattctacggaatctttgtgcgcctgttttataatcccctccccccaagtttgtaatttagaagcaaagtaccgtaacgatcaacagcaggcgtggcgcaccagccatgtctcgatcaagcacttctgttcccccggacagagtatcaatagactactcacgtggttgaaggagaaaacgtccgttatccggctaactacttcgagaaacctagtaacaccattgaaactgcagagcgtttcgctcagcacttaccccgtgtagatcaggtcgatgagtcactgcattccccacgggcgaccgtggcagtggctgcgttggcggcctgcctatggggtcacccataggacgctctaatgtggacatggtgcgaagagtctattgagctagttagtagtcctccggcccctgaatgcggctaatcctaactgcggagcgtatgccctcaaaccagggggtggtgcgtcgtaacgggtaactctgcagcggaaccgactactttgggtgtccgtgtttccttttatttccttactggctgcttatggtgacaattgaagaattgttgccatatagctattggattggccatccggtgtgtaacagagcaatcatctatttgttcgtcgggtatatcccactaacgctcaactcttttaacacattacaatacatactaatcctaaatacaagaaa

SEQ ID NO: 23875 - DNA, 649 bp, synthetic construct
  source 1..649: mol_type = other DNA
ccaagtttgtaatttagaagcaaagtaccgtaacgatcaacagcaggcgtggcgcaccagccatgtctcgatcaagcacttctgttcccccggacagagtatcaatagactactcacgtggttgaaggagaaaacgtccgttatccggctaactacttcgagaaacctagtaacaccattgaaactgcagagcgtttcgctcagcacttaccccgtgtagatcaggtcgatgagtcactgcattccccacgggcgaccgtggcagtggctgcgttggcggcctgcctatggggtcacccataggacgctctaatgtggacatggtgcgaagagtctattgagctagttagtagtcctccggcccctgaatgcggctaatcctaactgcggagcgtatgccctcaaaccagggggtggtgcgtcgtaacgggtaactctgcagcggaaccgactactttgggtgtccgtgtttccttttatttccttactggctgcttatggtgacaattgaagaattgttgccatatagctattggattggccatccggtgtgtaacagagcaatcatctatttgttcgtcgggtatatcccactaacgctcaactcttttaacacattacaatacatactaatcctaaatacaagaaa

SEQ ID NO: 23876 - DNA, 599 bp, synthetic construct
  source 1..599: mol_type = other DNA
ggcgcaccagccatgtctcgatcaagcacttctgttcccccggacagagtatcaatagactactcacgtggttgaaggagaaaacgtccgttatccggctaactacttcgagaaacctagtaacaccattgaaactgcagagcgtttcgctcagcacttaccccgtgtagatcaggtcgatgagtcactgcattccccacgggcgaccgtggcagtggctgcgttggcggcctgcctatggggtcacccataggacgctctaatgtggacatggtgcgaagagtctattgagctagttagtagtcctccggcccctgaatgcggctaatcctaactgcggagcgtatgccctcaaaccagggggtggtgcgtcgtaacgggtaactctgcagcggaaccgactactttgggtgtccgtgtttccttttatttccttactggctgcttatggtgacaattgaagaattgttgccatatagctattggattggccatccggtgtgtaacagagcaatcatctatttgttcgtcgggtatatcccactaacgctcaactcttttaacacattacaatacatactaatcctaaatacaagaaa

SEQ ID NO: 23877 - DNA, 549 bp, synthetic construct
  source 1..549: mol_type = other DNA
atcaatagactactcacgtggttgaaggagaaaacgtccgttatccggctaactacttcgagaaacctagtaacaccattgaaactgcagagcgtttcgctcagcacttaccccgtgtagatcaggtcgatgagtcactgcattccccacgggcgaccgtggcagtggctgcgttggcggcctgcctatggggtcacccataggacgctctaatgtggacatggtgcgaagagtctattgagctagttagtagtcctccggcccctgaatgcggctaatcctaactgcggagcgtatgccctcaaaccagggggtggtgcgtcgtaacgggtaactctgcagcggaaccgactactttgggtgtccgtgtttccttttatttccttactggctgcttatggtgacaattgaagaattgttgccatatagctattggattggccatccggtgtgtaacagagcaatcatctatttgttcgtcgggtatatcccactaacgctcaactcttttaacacattacaatacatactaatcctaaatacaagaaa

SEQ ID NO: 23878 - DNA, 699 bp, synthetic construct
  source 1..699: mol_type = other DNA
gtactccggtattacggtacccttgtacgcctgttttatactccctttccctagtaacttagaagttgtacaattaagttcaatagaagggggtacaaaccagtaccaccacgaacaagcacttctgtttccccggtgaagttgcatagactgtccccacggttaaaagtgactgatccgttatccgctcatttacttcgggaagcctagtatcatcttgggatcttcgatgcgttgcgctcaacactcaaccccagagtgtagcttaggtcgatgagtctggacactccccactggtgacagtggtccaggctgcgttggcggcctacctgtggtccaaagccacaggacgctagtagtgaacaaggtgtgaagagcctactgagctaattgagagtcctccggcccctgaatgcggataatcctaaccacggagcaggtgatcacaatccagtgattggcctgtcgtaatgcgtgagtctgtggcggaaccgactactttgggtgtccgtgtttcctttttactcttattatggctgcttatggtgacaatcatagattgttatcataaagcgaattggattggccatccggtgagaattaaatcgctaatatatctatttgttggatttaccaaaatcaactacagaacactagccttaattcgaatcgtgttactgatcagattccaccatcaca

SEQ ID NO: 23879 - DNA, 649 bp, synthetic construct
  source 1..649: mol_type = other DNA
ctagtaacttagaagttgtacaattaagttcaatagaagggggtacaaaccagtaccaccacgaacaagcacttctgtttccccggtgaagttgcatagactgtccccacggttaaaagtgactgatccgttatccgctcatttacttcgggaagcctagtatcatcttgggatcttcgatgcgttgcgctcaacactcaaccccagagtgtagcttaggtcgatgagtctggacactccccactggtgacagtggtccaggctgcgttggcggcctacctgtggtccaaagccacaggacgctagtagtgaacaaggtgtgaagagcctactgagctaattgagagtcctccggcccctgaatgcggataatcctaaccacggagcaggtgatcacaatccagtgattggcctgtcgtaatgcgtgagtctgtggcggaaccgactactttgggtgtccgtgtttcctttttactcttattatggctgcttatggtgacaatcatagattgttatcataaagcgaattggattggccatccggtgagaattaaatcgctaatatatctatttgttggatttaccaaaatcaactacagaacactagccttaattcgaatcgtgttactgatcagattccaccatcaca

SEQ ID NO: 23880 - DNA, 599 bp, synthetic construct
  source 1..599: mol_type = other DNA
cagtaccaccacgaacaagcacttctgtttccccggtgaagttgcatagactgtccccacggttaaaagtgactgatccgttatccgctcatttacttcgggaagcctagtatcatcttgggatcttcgatgcgttgcgctcaacactcaaccccagagtgtagcttaggtcgatgagtctggacactccccactggtgacagtggtccaggctgcgttggcggcctacctgtggtccaaagccacaggacgctagtagtgaacaaggtgtgaagagcctactgagctaattgagagtcctccggcccctgaatgcggataatcctaaccacggagcaggtgatcacaatccagtgattggcctgtcgtaatgcgtgagtctgtggcggaaccgactactttgggtgtccgtgtttcctttttactcttattatggctgcttatggtgacaatcatagattgttatcataaagcgaattggattggccatccggtgagaattaaatcgctaatatatctatttgttggatttaccaaaatcaactacagaacactagccttaattcgaatcgtgttactgatcagattccaccatcaca

SEQ ID NO: 23881 - DNA, 549 bp, synthetic construct
  source 1..549: mol_type = other DNA
ctgtccccacggttaaaagtgactgatccgttatccgctcatttacttcgggaagcctagtatcatcttgggatcttcgatgcgttgcgctcaacactcaaccccagagtgtagcttaggtcgatgagtctggacactccccactggtgacagtggtccaggctgcgttggcggcctacctgtggtccaaagccacaggacgctagtagtgaacaaggtgtgaagagcctactgagctaattgagagtcctccggcccctgaatgcggataatcctaaccacggagcaggtgatcacaatccagtgattggcctgtcgtaatgcgtgagtctgtggcggaaccgactactttgggtgtccgtgtttcctttttactcttattatggctgcttatggtgacaatcatagattgttatcataaagcgaattggattggccatccggtgagaattaaatcgctaatatatctatttgttggatttaccaaaatcaactacagaacactagccttaattcgaatcgtgttactgatcagattccaccatcaca

SEQ ID NO: 23882 - DNA, 699 bp, synthetic construct
  source 1..699: mol_type = other DNA
gtactctggtattacggtacctttgtacgcctgttttatactcccttcccctccgtaacttagaagcatgagaatcaagttcaatagaagggggtacaaaccagtaccaccacgaacaagcacttctgtcaccccggtgaggttgtatagactgtccccacggttgaaagcgactgatccgttatccgctcaattacttcgggaagcctagtaccatcctggaatcttcgatgcgttgcgctcagcactcaaccccagagtgtagcttaggccgatgagtctggacaatcctcactggcgacagtggtccaggctgcgttggcggcctacctgtggtccaaagccacaggacgctagttgtgaacaaggtgcgaagagcctactgagctaattgagagtcctccggcccctgaatgcggctaatcccaaccacggagcaggcggttgcaaaccagcaactggcttgtcgtaacgcgaaagtctgtggcggaaccgactactttgggtgtccgtgtttccttttattcttatgatggctgcttatggtgacaatcgttgattgttatcataaagcgaattggattggccatccggtgaaaatcaaatctattgtttacctgttcattgggttcactccactaacttcacacactatatatctcattaaggtcgtattactagtaaggaattatcaccaaa

SEQ ID NO: 23883 - DNA, 649 bp, synthetic construct
  source 1..649: mol_type = other DNA
ctccgtaacttagaagcatgagaatcaagttcaatagaagggggtacaaaccagtaccaccacgaacaagcacttctgtcaccccggtgaggttgtatagactgtccccacggttgaaagcgactgatccgttatccgctcaattacttcgggaagcctagtaccatcctggaatcttcgatgcgttgcgctcagcactcaaccccagagtgtagcttaggccgatgagtctggacaatcctcactggcgacagtggtccaggctgcgttggcggcctacctgtggtccaaagccacaggacgctagttgtgaacaaggtgcgaagagcctactgagctaattgagagtcctccggcccctgaatgcggctaatcccaaccacggagcaggcggttgcaaaccagcaactggcttgtcgtaacgcgaaagtctgtggcggaaccgactactttgggtgtccgtgtttccttttattcttatgatggctgcttatggtgacaatcgttgattgttatcataaagcgaattggattggccatccggtgaaaatcaaatctattgtttacctgttcattgggttcactccactaacttcacacactatatatctcattaaggtcgtattactagtaaggaattatcaccaaa

SEQ ID NO: 23884 - DNA, 599 bp, synthetic construct
  source 1..599: mol_type = other DNA
ccagtaccaccacgaacaagcacttctgtcaccccggtgaggttgtatagactgtccccacggttgaaagcgactgatccgttatccgctcaattacttcgggaagcctagtaccatcctggaatcttcgatgcgttgcgctcagcactcaaccccagagtgtagcttaggccgatgagtctggacaatcctcactggcgacagtggtccaggctgcgttggcggcctacctgtggtccaaagccacaggacgctagttgtgaacaaggtgcgaagagcctactgagctaattgagagtcctccggcccctgaatgcggctaatcccaaccacggagcaggcggttgcaaaccagcaactggcttgtcgtaacgcgaaagtctgtggcggaaccgactactttgggtgtccgtgtttccttttattcttatgatggctgcttatggtgacaatcgttgattgttatcataaagcgaattggattggccatccggtgaaaatcaaatctattgtttacctgttcattgggttcactccactaacttcacacactatatatctcattaaggtcgtattactagtaaggaattatcaccaaa

SEQ ID NO: 23885 - DNA, 549 bp, synthetic construct
  source 1..549: mol_type = other DNA
actgtccccacggttgaaagcgactgatccgttatccgctcaattacttcgggaagcctagtaccatcctggaatcttcgatgcgttgcgctcagcactcaaccccagagtgtagcttaggccgatgagtctggacaatcctcactggcgacagtggtccaggctgcgttggcggcctacctgtggtccaaagccacaggacgctagttgtgaacaaggtgcgaagagcctactgagctaattgagagtcctccggcccctgaatgcggctaatcccaaccacggagcaggcggttgcaaaccagcaactggcttgtcgtaacgcgaaagtctgtggcggaaccgactactttgggtgtccgtgtttccttttattcttatgatggctgcttatggtgacaatcgttgattgttatcataaagcgaattggattggccatccggtgaaaatcaaatctattgtttacctgttcattgggttcactccactaacttcacacactatatatctcattaaggtcgtattactagtaaggaattatcaccaaa

SEQ ID NO: 23886 - DNA, 699 bp, synthetic construct
  source 1..699: mol_type = other DNA
gtactctggtattacggtacccttgtacgcctgttttatactcccttccccgtaacttagaagaaataaaccaagttcaatagaagggggcacaaaccagtgtcaccacgaacaagcacttctgtttccccggtgatattgtatagactgtacccacggttaaaagcgattgatccgttatccgctcttgtacttcgaaaagcctagtatcatcttggaatcttcgatgcgttgcgctcaacactcaaccccagagtgtagcttaggtcgatgagtctggacattccccaccggcgacggtggtccaggctgcgttggcggcctacctgtggcccaaagccacaggacgctagttgtgaacaaggtgtgaagagcctattgagctgcaagagagtcctccggcccctgaatgcggctaatcccaaccacggagcaagtgctcacacaccagtgagtggcttgtcgtaacgcgcaagtctgtggcggaaccgactactttgggtgtccgtgtttcctgttatttttatcatggctgcttatggtgacaatcagagattgttatcataaagcgaattggattggccatccggtgagtgttgtgtcaggtatacaactgtttgttggaaccactgtgttaactttacttctcatttaaccaattaatcaaaaacaatacgaggataaaacaacaatactaca

SEQ ID NO: 23887 - DNA, 649 bp, synthetic construct
  source 1..649: mol_type = other DNA
cgtaacttagaagaaataaaccaagttcaatagaagggggcacaaaccagtgtcaccacgaacaagcacttctgtttccccggtgatattgtatagactgtacccacggttaaaagcgattgatccgttatccgctcttgtacttcgaaaagcctagtatcatcttggaatcttcgatgcgttgcgctcaacactcaaccccagagtgtagcttaggtcgatgagtctggacattccccaccggcgacggtggtccaggctgcgttggcggcctacctgtggcccaaagccacaggacgctagttgtgaacaaggtgtgaagagcctattgagctgcaagagagtcctccggcccctgaatgcggctaatcccaaccacggagcaagtgctcacacaccagtgagtggcttgtcgtaacgcgcaagtctgtggcggaaccgactactttgggtgtccgtgtttcctgttatttttatcatggctgcttatggtgacaatcagagattgttatcataaagcgaattggattggccatccggtgagtgttgtgtcaggtatacaactgtttgttggaaccactgtgttaactttacttctcatttaaccaattaatcaaaaacaatacgaggataaaacaacaatactaca

SEQ ID NO: 23888 - DNA, 599 bp, synthetic construct
  source 1..599: mol_type = other DNA
tgtcaccacgaacaagcacttctgtttccccggtgatattgtatagactgtacccacggttaaaagcgattgatccgttatccgctcttgtacttcgaaaagcctagtatcatcttggaatcttcgatgcgttgcgctcaacactcaaccccagagtgtagcttaggtcgatgagtctggacattccccaccggcgacggtggtccaggctgcgttggcggcctacctgtggcccaaagccacaggacgctagttgtgaacaaggtgtgaagagcctattgagctgcaagagagtcctccggcccctgaatgcggctaatcccaaccacggagcaagtgctcacacaccagtgagtggcttgtcgtaacgcgcaagtctgtggcggaaccgactactttgggtgtccgtgtttcctgttatttttatcatggctgcttatggtgacaatcagagattgttatcataaagcgaattggattggccatccggtgagtgttgtgtcaggtatacaactgtttgttggaaccactgtgttaactttacttctcatttaaccaattaatcaaaaacaatacgaggataaaacaacaatactaca

SEQ ID NO: 23889 - DNA, 549 bp, synthetic construct
  source 1..549: mol_type = other DNA
tacccacggttaaaagcgattgatccgttatccgctcttgtacttcgaaaagcctagtatcatcttggaatcttcgatgcgttgcgctcaacactcaaccccagagtgtagcttaggtcgatgagtctggacattccccaccggcgacggtggtccaggctgcgttggcggcctacctgtggcccaaagccacaggacgctagttgtgaacaaggtgtgaagagcctattgagctgcaagagagtcctccggcccctgaatgcggctaatcccaaccacggagcaagtgctcacacaccagtgagtggcttgtcgtaacgcgcaagtctgtggcggaaccgactactttgggtgtccgtgtttcctgttatttttatcatggctgcttatggtgacaatcagagattgttatcataaagcgaattggattggccatccggtgagtgttgtgtcaggtatacaactgtttgttggaaccactgtgttaactttacttctcatttaaccaattaatcaaaaacaatacgaggataaaacaacaatactaca

SEQ ID NO: 23890 - DNA, 699 bp, synthetic construct
  source 1..699: mol_type = other DNA
gtacaccggtattacggtacccttgtacgcctgttttatactcccttccccctgtaacttagaagctcaagaatccaagttcaatagaagggggtacaaaccagtaccaccacgaacaagcacttctgtttccccggtgaagttgcatagactgttcccacggttgaaagtgactgatccgttatccgctcaactacttcgagaagcccagtatcatcttggaatcttcgatgcgttgcgctcagcactcgaccccggagtgtagcttaggctgatgagtctggacgttccccactggtgacagtggtccaggctgcgttggcggcctacctgtggtccaaagccacaggacgctagttgtgaacaaggtgtgaagagcctattgagctaattgagaatcctccggcccctgaatgcggctaatcccaaccacggagcaggtggttacaacccagtaactggcctgtcgtaacgcgtaagtctgtggcggaaccgactactttgggtgtccgtgtttccttttattcctataatggctgcttatggtgacaatcacagattgttatcataaagcgaattggattggccatccggtgagagttaagacaattatccacttgttcattggatttacccctctgactaattacacactcaaccttattagaattgtagttctagtgagatactactgtcata

SEQ ID NO: 23891 - DNA, 649 bp, synthetic construct
  source 1..649: mol_type = other DNA
cctgtaacttagaagctcaagaatccaagttcaatagaagggggtacaaaccagtaccaccacgaacaagcacttctgtttccccggtgaagttgcatagactgttcccacggttgaaagtgactgatccgttatccgctcaactacttcgagaagcccagtatcatcttggaatcttcgatgcgttgcgctcagcactcgaccccggagtgtagcttaggctgatgagtctggacgttccccactggtgacagtggtccaggctgcgttggcggcctacctgtggtccaaagccacaggacgctagttgtgaacaaggtgtgaagagcctattgagctaattgagaatcctccggcccctgaatgcggctaatcccaaccacggagcaggtggttacaacccagtaactggcctgtcgtaacgcgtaagtctgtggcggaaccgactactttgggtgtccgtgtttccttttattcctataatggctgcttatggtgacaatcacagattgttatcataaagcgaattggattggccatccggtgagagttaagacaattatccacttgttcattggatttacccctctgactaattacacactcaaccttattagaattgtagttctagtgagatactactgtcata

SEQ ID NO: 23892 - DNA, 599 bp, synthetic construct
  source 1..599: mol_type = other DNA
ccagtaccaccacgaacaagcacttctgtttccccggtgaagttgcatagactgttcccacggttgaaagtgactgatccgttatccgctcaactacttcgagaagcccagtatcatcttggaatcttcgatgcgttgcgctcagcactcgaccccggagtgtagcttaggctgatgagtctggacgttccccactggtgacagtggtccaggctgcgttggcggcctacctgtggtccaaagccacaggacgctagttgtgaacaaggtgtgaagagcctattgagctaattgagaatcctccggcccctgaatgcggctaatcccaaccacggagcaggtggttacaacccagtaactggcctgtcgtaacgcgtaagtctgtggcggaaccgactactttgggtgtccgtgtttccttttattcctataatggctgcttatggtgacaatcacagattgttatcataaagcgaattggattggccatccggtgagagttaagacaattatccacttgttcattggatttacccctctgactaattacacactcaaccttattagaattgtagttctagtgagatactactgtcata

SEQ ID NO: 23893 - DNA, 549 bp, synthetic construct
  source 1..549: mol_type = other DNA
actgttcccacggttgaaagtgactgatccgttatccgctcaactacttcgagaagcccagtatcatcttggaatcttcgatgcgttgcgctcagcactcgaccccggagtgtagcttaggctgatgagtctggacgttccccactggtgacagtggtccaggctgcgttggcggcctacctgtggtccaaagccacaggacgctagttgtgaacaaggtgtgaagagcctattgagctaattgagaatcctccggcccctgaatgcggctaatcccaaccacggagcaggtggttacaacccagtaactggcctgtcgtaacgcgtaagtctgtggcggaaccgactactttgggtgtccgtgtttccttttattcctataatggctgcttatggtgacaatcacagattgttatcataaagcgaattggattggccatccggtgagagttaagacaattatccacttgttcattggatttacccctctgactaattacacactcaaccttattagaattgtagttctagtgagatactactgtcata

SEQ ID NO: 23894 - DNA, 699 bp, synthetic construct
  source 1..699: mol_type = other DNA
gtactccggtattacggtacccttgtacgcctgttttatactcccttccccgtaacttagaagcaataaatcaagttcaccaggagggggtacaaaccagtaccaccacgaacaagcacttctgtttccccggtgacgttgcatagactgtccccacggttgaaagcgactgatccgttatccgctcgtgtacttcgagaagcctagtatcatcttggaatcttcgatgcgttgcgctcagcactcgaccccggagtgtagcttaggctgatgagtctggacattcctcaccggcgacggtggtccaggctgcgttggcggcctacctgtggctcaaagccacaggacgctagttgtgaacaaggtgtgaagagcctattgagctacacgagaatcctccggcccctgaatgcggctaatcccaaccacggagcaagtgctcacaaaccagtgagtggcttgtcgtaacgggtaactctgtggcggaaccgactactttgggtgtccgtgtttcctttttatttttgtatggctgcttatggtgacaatcagagattgttatcataaagcgtattggattggccatccggtgagtgttgtgtcaggtatacaactgtttgttggaaccactgtgttagctttacttctcatttaaccaattaatcaaaaacaatacgaggataaaacaacaatactaca

SEQ ID NO: 23895 - DNA, 649 bp, synthetic construct
  source 1..649: mol_type = other DNA
cgtaacttagaagcaataaatcaagttcaccaggagggggtacaaaccagtaccaccacgaacaagcacttctgtttccccggtgacgttgcatagactgtccccacggttgaaagcgactgatccgttatccgctcgtgtacttcgagaagcctagtatcatcttggaatcttcgatgcgttgcgctcagcactcgaccccggagtgtagcttaggctgatgagtctggacattcctcaccggcgacggtggtccaggctgcgttggcggcctacctgtggctcaaagccacaggacgctagttgtgaacaaggtgtgaagagcctattgagctacacgagaatcctccggcccctgaatgcggctaatcccaaccacggagcaagtgctcacaaaccagtgagtggcttgtcgtaacgggtaactctgtggcggaaccgactactttgggtgtccgtgtttcctttttatttttgtatggctgcttatggtgacaatcagagattgttatcataaagcgtattggattggccatccggtgagtgttgtgtcaggtatacaactgtttgttggaaccactgtgttagctttacttctcatttaaccaattaatcaaaaacaatacgaggataaaacaacaatactaca

SEQ ID NO: 23896 - DNA, 599 bp, synthetic construct
  source 1..599: mol_type = other DNA
taccaccacgaacaagcacttctgtttccccggtgacgttgcatagactgtccccacggttgaaagcgactgatccgttatccgctcgtgtacttcgagaagcctagtatcatcttggaatcttcgatgcgttgcgctcagcactcgaccccggagtgtagcttaggctgatgagtctggacattcctcaccggcgacggtggtccaggctgcgttggcggcctacctgtggctcaaagccacaggacgctagttgtgaacaaggtgtgaagagcctattgagctacacgagaatcctccggcccctgaatgcggctaatcccaaccacggagcaagtgctcacaaaccagtgagtggcttgtcgtaacgggtaactctgtggcggaaccgactactttgggtgtccgtgtttcctttttatttttgtatggctgcttatggtgacaatcagagattgttatcataaagcgtattggattggccatccggtgagtgttgtgtcaggtatacaactgtttgttggaaccactgtgttagctttacttctcatttaaccaattaatcaaaaacaatacgaggataaaacaacaatactaca

SEQ ID NO: 23897 - DNA, 549 bp, synthetic construct
  source 1..549: mol_type = other DNA
tccccacggttgaaagcgactgatccgttatccgctcgtgtacttcgagaagcctagtatcatcttggaatcttcgatgcgttgcgctcagcactcgaccccggagtgtagcttaggctgatgagtctggacattcctcaccggcgacggtggtccaggctgcgttggcggcctacctgtggctcaaagccacaggacgctagttgtgaacaaggtgtgaagagcctattgagctacacgagaatcctccggcccctgaatgcggctaatcccaaccacggagcaagtgctcacaaaccagtgagtggcttgtcgtaacgggtaactctgtggcggaaccgactactttgggtgtccgtgtttcctttttatttttgtatggctgcttatggtgacaatcagagattgttatcataaagcgtattggattggccatccggtgagtgttgtgtcaggtatacaactgtttgttggaaccactgtgttagctttacttctcatttaaccaattaatcaaaaacaatacgaggataaaacaacaatactaca

SEQ ID NO: 23898 - DNA, 700 bp, synthetic construct
  source 1..700: mol_type = other DNA
gtactccggtattccggtacccttgtacgcctgttttatactcccctcccccgtaacttagaagaaacaaaccaagttcactaggagggggtacaaaccagtaccaccacgaacaagcacttctgtttccccggtgatattgtatagactgtacccacggtcgaaaacgattgatccgttatccgcttctgtacttcgagaagcctagtaccactttggaatcttcgatgcgttgcgctcagcactcaaccccagagtgtagcttaggtcgatgagcctggactttcctcactggcgacagtggtccaggctgcgttggcggcctacctgtggcccaaagccacaggacgctagttgtgaacaaggtgtgaagagcctattgagctacaaaagagtcctccggcccctgaatgcggctaatcccaaccatggagcaagggtgtacgaaccagtacatatcttgtcgtaacgcgcaagtccgtggcggaaccgactactttgggtgtccgtgtttccttttattttcatactggctgcttatggtgacaatcatagattgttatcataaagcgaattggattggccatccggtgagtgttgtgtcaggtatacaattgtttgttggaaccactgtgtcagctttacttctcatttaaccaattaatcaaaaacaatacgaggataaaacaacaataccaca

SEQ ID NO: 23899 - DNA, 650 bp, synthetic construct
  source 1..650: mol_type = other DNA
ccgtaacttagaagaaacaaaccaagttcactaggagggggtacaaaccagtaccaccacgaacaagcacttctgtttccccggtgatattgtatagactgtacccacggtcgaaaacgattgatccgttatccgcttctgtacttcgagaagcctagtaccactttggaatcttcgatgcgttgcgctcagcactcaaccccagagtgtagcttaggtcgatgagcctggactttcctcactggcgacagtggtccaggctgcgttggcggcctacctgtggcccaaagccacaggacgctagttgtgaacaaggtgtgaagagcctattgagctacaaaagagtcctccggcccctgaatgcggctaatcccaaccatggagcaagggtgtacgaaccagtacatatcttgtcgtaacgcgcaagtccgtggcggaaccgactactttgggtgtccgtgtttccttttattttcatactggctgcttatggtgacaatcatagattgttatcataaagcgaattggattggccatccggtgagtgttgtgtcaggtatacaattgtttgttggaaccactgtgtcagctttacttctcatttaaccaattaatcaaaaacaatacgaggataaaacaacaataccaca

SEQ ID NO: 23900 - DNA, 600 bp, synthetic construct
  source 1..600: mol_type = other DNA
gtaccaccacgaacaagcacttctgtttccccggtgatattgtatagactgtacccacggtcgaaaacgattgatccgttatccgcttctgtacttcgagaagcctagtaccactttggaatcttcgatgcgttgcgctcagcactcaaccccagagtgtagcttaggtcgatgagcctggactttcctcactggcgacagtggtccaggctgcgttggcggcctacctgtggcccaaagccacaggacgctagttgtgaacaaggtgtgaagagcctattgagctacaaaagagtcctccggcccctgaatgcggctaatcccaaccatggagcaagggtgtacgaaccagtacatatcttgtcgtaacgcgcaagtccgtggcggaaccgactactttgggtgtccgtgtttccttttattttcatactggctgcttatggtgacaatcatagattgttatcataaagcgaattggattggccatccggtgagtgttgtgtcaggtatacaattgtttgttggaaccactgtgtcagctttacttctcatttaaccaattaatcaaaaacaatacgaggataaaacaacaataccaca

SEQ ID NO: 23901 - DNA, 550 bp, synthetic construct
  source 1..550: mol_type = other DNA
gtacccacggtcgaaaacgattgatccgttatccgcttctgtacttcgagaagcctagtaccactttggaatcttcgatgcgttgcgctcagcactcaaccccagagtgtagcttaggtcgatgagcctggactttcctcactggcgacagtggtccaggctgcgttggcggcctacctgtggcccaaagccacaggacgctagttgtgaacaaggtgtgaagagcctattgagctacaaaagagtcctccggcccctgaatgcggctaatcccaaccatggagcaagggtgtacgaaccagtacatatcttgtcgtaacgcgcaagtccgtggcggaaccgactactttgggtgtccgtgtttccttttattttcatactggctgcttatggtgacaatcatagattgttatcataaagcgaattggattggccatccggtgagtgttgtgtcaggtatacaattgtttgttggaaccactgtgtcagctttacttctcatttaaccaattaatcaaaaacaatacgaggataaaacaacaataccaca

SEQ ID NO: 23902 - DNA, 500 bp, synthetic construct
  source 1..500: mol_type = other DNA
aagcctagtaccactttggaatcttcgatgcgttgcgctcagcactcaaccccagagtgtagcttaggtcgatgagcctggactttcctcactggcgacagtggtccaggctgcgttggcggcctacctgtggcccaaagccacaggacgctagttgtgaacaaggtgtgaagagcctattgagctacaaaagagtcctccggcccctgaatgcggctaatcccaaccatggagcaagggtgtacgaaccagtacatatcttgtcgtaacgcgcaagtccgtggcggaaccgactactttgggtgtccgtgtttccttttattttcatactggctgcttatggtgacaatcatagattgttatcataaagcgaattggattggccatccggtgagtgttgtgtcaggtatacaattgtttgttggaaccactgtgtcagctttacttctcatttaaccaattaatcaaaaacaatacgaggataaaacaacaataccaca

SEQ ID NO: 23903 - DNA, 703 bp, synthetic construct
  source 1..703: mol_type = other DNA
agcactcttattctacggaatatttgtgcgcctgttttatagccctcccccattaagtaacttagaagtgatgtgcagcacagatcaatagcaggcatagcgcaccagctgtgtcttgatcaagcactcctgtttccccggactgagtatcaataaactgctcacgcggttgaaggagaaaacgttcgttacccggctaaccacttcgagaaacttagtaacaccattgaagctgtagagtgtttcgctcagcacttccccagtgtagatcaggctgatgagtcactgcgaccctcacgggcgaccgtggcagtggctgcgttggcggcctgcctatggggcaacccataggacgctctaaagtggacatggtgtgaagagtctattgagctggttagtagtcctccggcccctgaatgcggctaatcctaactgcggagcgcatgccctcaaaccagggggtggtgcgtcgtaacgggtaactctgcagcggaaccgactactttgggtgtccgtgtttccttttattctcatattggctgcttatggtgacaattgaagaattgttaccatatagctattggattggccatccggtgtgtaacagagcgattatcttctcttttattgcctttgtcccattgaccccaactgcgttaaacactctgcaatatatactctatcttaactctaggaagcgaac

SEQ ID NO: 23904 - DNA, 653 bp, synthetic construct
  source 1..653: mol_type = other DNA
cattaagtaacttagaagtgatgtgcagcacagatcaatagcaggcatagcgcaccagctgtgtcttgatcaagcactcctgtttccccggactgagtatcaataaactgctcacgcggttgaaggagaaaacgttcgttacccggctaaccacttcgagaaacttagtaacaccattgaagctgtagagtgtttcgctcagcacttccccagtgtagatcaggctgatgagtcactgcgaccctcacgggcgaccgtggcagtggctgcgttggcggcctgcctatggggcaacccataggacgctctaaagtggacatggtgtgaagagtctattgagctggttagtagtcctccggcccctgaatgcggctaatcctaactgcggagcgcatgccctcaaaccagggggtggtgcgtcgtaacgggtaactctgcagcggaaccgactactttgggtgtccgtgtttccttttattctcatattggctgcttatggtgacaattgaagaattgttaccatatagctattggattggccatccggtgtgtaacagagcgattatcttctcttttattgcctttgtcccattgaccccaactgcgttaaacactctgcaatatatactctatcttaactctaggaagcgaac

SEQ ID NO: 23905 - DNA, 603 bp, synthetic construct
  source 1..603: mol_type = other DNA
cgcaccagctgtgtcttgatcaagcactcctgtttccccggactgagtatcaataaactgctcacgcggttgaaggagaaaacgttcgttacccggctaaccacttcgagaaacttagtaacaccattgaagctgtagagtgtttcgctcagcacttccccagtgtagatcaggctgatgagtcactgcgaccctcacgggcgaccgtggcagtggctgcgttggcggcctgcctatggggcaacccataggacgctctaaagtggacatggtgtgaagagtctattgagctggttagtagtcctccggcccctgaatgcggctaatcctaactgcggagcgcatgccctcaaaccagggggtggtgcgtcgtaacgggtaactctgcagcggaaccgactactttgggtgtccgtgtttccttttattctcatattggctgcttatggtgacaattgaagaattgttaccatatagctattggattggccatccggtgtgtaacagagcgattatcttctcttttattgcctttgtcccattgaccccaactgcgttaaacactctgcaatatatactctatcttaactctaggaagcgaac

SEQ ID NO: 23906 - DNA, 553 bp, synthetic construct
  source 1..553: mol_type = other DNA
caataaactgctcacgcggttgaaggagaaaacgttcgttacccggctaaccacttcgagaaacttagtaacaccattgaagctgtagagtgtttcgctcagcacttccccagtgtagatcaggctgatgagtcactgcgaccctcacgggcgaccgtggcagtggctgcgttggcggcctgcctatggggcaacccataggacgctctaaagtggacatggtgtgaagagtctattgagctggttagtagtcctccggcccctgaatgcggctaatcctaactgcggagcgcatgccctcaaaccagggggtggtgcgtcgtaacgggtaactctgcagcggaaccgactactttgggtgtccgtgtttccttttattctcatattggctgcttatggtgacaattgaagaattgttaccatatagctattggattggccatccggtgtgtaacagagcgattatcttctcttttattgcctttgtcccattgaccccaactgcgttaaacactctgcaatatatactctatcttaactctaggaagcgaac

SEQ ID NO: 23907 - DNA, 503 bp, synthetic construct
  source 1..503: mol_type = other DNA
ccacttcgagaaacttagtaacaccattgaagctgtagagtgtttcgctcagcacttccccagtgtagatcaggctgatgagtcactgcgaccctcacgggcgaccgtggcagtggctgcgttggcggcctgcctatggggcaacccataggacgctctaaagtggacatggtgtgaagagtctattgagctggttagtagtcctccggcccctgaatgcggctaatcctaactgcggagcgcatgccctcaaaccagggggtggtgcgtcgtaacgggtaactctgcagcggaaccgactactttgggtgtccgtgtttccttttattctcatattggctgcttatggtgacaattgaagaattgttaccatatagctattggattggccatccggtgtgtaacagagcgattatcttctcttttattgcctttgtcccattgaccccaactgcgttaaacactctgcaatatatactctatcttaactctaggaagcgaac

SEQ ID NO: 23908 - DNA, 703 bp, synthetic construct
  source 1..703: mol_type = other DNA
gtactctggtattacggtacccttgtacgcctgttttatactcccttcccatgtaacttagaagcaaataacacaagttcaatagaagggggtacaaaccagtaccaccacgaacaagcacttctgttaccccggtgaagttgcatagactgttcccacggttgaaagcgaccgatccgttatccgctcaagtacttcgagaagcctagtatcaccttggaatcttcgatgcgttgcgctcatcactcaaccccagagtgtagcttgggctgatgagtctggacgtccctcactggcgacagtggtccaggctgcgttggcggcctacctatggcccaaagccataggacgctagttgtgaacaaggtgtgaagagcctattgagctacttgagagtcctccggcccctgaatgcggctaatcccaaccacggatcaggtgattgcaaaccagcaattagcctgtcgtaacgcgcaagtctgtggcggaaccgactactttgggtgtccgtgtttccttttattttactattggctgcttatggtgacaatcattgattgttatcataaagcgaattggattggccatccggtgaaagtaaaacaggttatttacctttttgttggatttactgcattatctaagcacactccagatttaattcgtatcgttcttgcgattaggagagcacacttttccagca

SEQ ID NO: 23909 - DNA, 653 bp, synthetic construct
  source 1..653: mol_type = other DNA
atgtaacttagaagcaaataacacaagttcaatagaagggggtacaaaccagtaccaccacgaacaagcacttctgttaccccggtgaagttgcatagactgttcccacggttgaaagcgaccgatccgttatccgctcaagtacttcgagaagcctagtatcaccttggaatcttcgatgcgttgcgctcatcactcaaccccagagtgtagcttgggctgatgagtctggacgtccctcactggcgacagtggtccaggctgcgttggcggcctacctatggcccaaagccataggacgctagttgtgaacaaggtgtgaagagcctattgagctacttgagagtcctccggcccctgaatgcggctaatcccaaccacggatcaggtgattgcaaaccagcaattagcctgtcgtaacgcgcaagtctgtggcggaaccgactactttgggtgtccgtgtttccttttattttactattggctgcttatggtgacaatcattgattgttatcataaagcgaattggattggccatccggtgaaagtaaaacaggttatttacctttttgttggatttactgcattatctaagcacactccagatttaattcgtatcgttcttgcgattaggagagcacacttttccagca

SEQ ID NO: 23910 - DNA, 603 bp, synthetic construct
  source 1..603: mol_type = other DNA
agtaccaccacgaacaagcacttctgttaccccggtgaagttgcatagactgttcccacggttgaaagcgaccgatccgttatccgctcaagtacttcgagaagcctagtatcaccttggaatcttcgatgcgttgcgctcatcactcaaccccagagtgtagcttgggctgatgagtctggacgtccctcactggcgacagtggtccaggctgcgttggcggcctacctatggcccaaagccataggacgctagttgtgaacaaggtgtgaagagcctattgagctacttgagagtcctccggcccctgaatgcggctaatcccaaccacggatcaggtgattgcaaaccagcaattagcctgtcgtaacgcgcaagtctgtggcggaaccgactactttgggtgtccgtgtttccttttattttactattggctgcttatggtgacaatcattgattgttatcataaagcgaattggattggccatccggtgaaagtaaaacaggttatttacctttttgttggatttactgcattatctaagcacactccagatttaattcgtatcgttcttgcgattaggagagcacacttttccagca

SEQ ID NO: 23911 - DNA, 553 bp, synthetic construct
  source 1..553: mol_type = other DNA
tgttcccacggttgaaagcgaccgatccgttatccgctcaagtacttcgagaagcctagtatcaccttggaatcttcgatgcgttgcgctcatcactcaaccccagagtgtagcttgggctgatgagtctggacgtccctcactggcgacagtggtccaggctgcgttggcggcctacctatggcccaaagccataggacgctagttgtgaacaaggtgtgaagagcctattgagctacttgagagtcctccggcccctgaatgcggctaatcccaaccacggatcaggtgattgcaaaccagcaattagcctgtcgtaacgcgcaagtctgtggcggaaccgactactttgggtgtccgtgtttccttttattttactattggctgcttatggtgacaatcattgattgttatcataaagcgaattggattggccatccggtgaaagtaaaacaggttatttacctttttgttggatttactgcattatctaagcacactccagatttaattcgtatcgttcttgcgattaggagagcacacttttccagca

SEQ ID NO: 23912 - DNA, 503 bp, synthetic construct
  source 1..503: mol_type = other DNA
gaagcctagtatcaccttggaatcttcgatgcgttgcgctcatcactcaaccccagagtgtagcttgggctgatgagtctggacgtccctcactggcgacagtggtccaggctgcgttggcggcctacctatggcccaaagccataggacgctagttgtgaacaaggtgtgaagagcctattgagctacttgagagtcctccggcccctgaatgcggctaatcccaaccacggatcaggtgattgcaaaccagcaattagcctgtcgtaacgcgcaagtctgtggcggaaccgactactttgggtgtccgtgtttccttttattttactattggctgcttatggtgacaatcattgattgttatcataaagcgaattggattggccatccggtgaaagtaaaacaggttatttacctttttgttggatttactgcattatctaagcacactccagatttaattcgtatcgttcttgcgattaggagagcacacttttccagca

SEQ ID NO: 23913 - DNA, 703 bp, synthetic construct
  source 1..703: mol_type = other DNA
ctgggcgcatgcactctggtatcacggtacctttgtgcgcctgttttatctcccctcccccccgtgtaatttagaagcataagcacaatgatcaatagacaacccagtgcaccaactgggccttgatcaagcacttctgttaccccgggccgactatcaataggctgctcacgtggctgaaggagaaaacgctcgttacccggccagttacttcgagaagcctagtaccaccatgaacgttgcgcagtgtttcgctccgcacaaccccagtgtagatcaggtcgatgagtcaccgcatcccccacgggtgaccgtggcggtggctgcgttggcggcctgcccatggggtaacccatgggacgctacaatactgacatggtgtgaagagtctattgagctaactggtagtcctccggcccctgaatgcggctaatcccaactgcggagcacgtgcttccaatccaggaggtagcgtgtcgtaacgggcaactctgcagcggaaccgactactttgggtgtccgtgtttcctttatctctttattggctgcttatggtgacaattgaaagattgttgccatatagctattggattggccatccggtatctaacagagcaatcatatacctgtttgttggatttgttccacttaacaaaacagagttccgtactttgtgttatattattaggttgaacacatcaaa

SEQ ID NO: 23914 - DNA, 653 bp, synthetic construct
  source 1..653: mol_type = other DNA
tcccctcccccccgtgtaatttagaagcataagcacaatgatcaatagacaacccagtgcaccaactgggccttgatcaagcacttctgttaccccgggccgactatcaataggctgctcacgtggctgaaggagaaaacgctcgttacccggccagttacttcgagaagcctagtaccaccatgaacgttgcgcagtgtttcgctccgcacaaccccagtgtagatcaggtcgatgagtcaccgcatcccccacgggtgaccgtggcggtggctgcgttggcggcctgcccatggggtaacccatgggacgctacaatactgacatggtgtgaagagtctattgagctaactggtagtcctccggcccctgaatgcggctaatcccaactgcggagcacgtgcttccaatccaggaggtagcgtgtcgtaacgggcaactctgcagcggaaccgactactttgggtgtccgtgtttcctttatctctttattggctgcttatggtgacaattgaaagattgttgccatatagctattggattggccatccggtatctaacagagcaatcatatacctgtttgttggatttgttccacttaacaaaacagagttccgtactttgtgttatattattaggttgaacacatcaaa

SEQ ID NO: 23915 - DNA, 603 bp, synthetic construct
  source 1..603: mol_type = other DNA
aacccagtgcaccaactgggccttgatcaagcacttctgttaccccgggccgactatcaataggctgctcacgtggctgaaggagaaaacgctcgttacccggccagttacttcgagaagcctagtaccaccatgaacgttgcgcagtgtttcgctccgcacaaccccagtgtagatcaggtcgatgagtcaccgcatcccccacgggtgaccgtggcggtggctgcgttggcggcctgcccatggggtaacccatgggacgctacaatactgacatggtgtgaagagtctattgagctaactggtagtcctccggcccctgaatgcggctaatcccaactgcggagcacgtgcttccaatccaggaggtagcgtgtcgtaacgggcaactctgcagcggaaccgactactttgggtgtccgtgtttcctttatctctttattggctgcttatggtgacaattgaaagattgttgccatatagctattggattggccatccggtatctaacagagcaatcatatacctgtttgttggatttgttccacttaacaaaacagagttccgtactttgtgttatattattaggttgaacacatcaaa

SEQ ID NO: 23916 - DNA, 553 bp, synthetic construct
  source 1..553: mol_type = other DNA
cgactatcaataggctgctcacgtggctgaaggagaaaacgctcgttacccggccagttacttcgagaagcctagtaccaccatgaacgttgcgcagtgtttcgctccgcacaaccccagtgtagatcaggtcgatgagtcaccgcatcccccacgggtgaccgtggcggtggctgcgttggcggcctgcccatggggtaacccatgggacgctacaatactgacatggtgtgaagagtctattgagctaactggtagtcctccggcccctgaatgcggctaatcccaactgcggagcacgtgcttccaatccaggaggtagcgtgtcgtaacgggcaactctgcagcggaaccgactactttgggtgtccgtgtttcctttatctctttattggctgcttatggtgacaattgaaagattgttgccatatagctattggattggccatccggtatctaacagagcaatcatatacctgtttgttggatttgttccacttaacaaaacagagttccgtactttgtgttatattattaggttgaacacatcaaa

SEQ ID NO: 23917 - DNA, 503 bp, synthetic construct
  source 1..503: mol_type = other DNA
cggccagttacttcgagaagcctagtaccaccatgaacgttgcgcagtgtttcgctccgcacaaccccagtgtagatcaggtcgatgagtcaccgcatcccccacgggtgaccgtggcggtggctgcgttggcggcctgcccatggggtaacccatgggacgctacaatactgacatggtgtgaagagtctattgagctaactggtagtcctccggcccctgaatgcggctaatcccaactgcggagcacgtgcttccaatccaggaggtagcgtgtcgtaacgggcaactctgcagcggaaccgactactttgggtgtccgtgtttcctttatctctttattggctgcttatggtgacaattgaaagattgttgccatatagctattggattggccatccggtatctaacagagcaatcatatacctgtttgttggatttgttccacttaacaaaacagagttccgtactttgtgttatattattaggttgaacacatcaaa

SEQ ID NO: 23918 - DNA, 703 bp, synthetic construct
  source 1..703: mol_type = other DNA
gtactccggtattacggtacccttgtacgcctgttttatactcccttcccccgtaacttagaagtaacacaaatccaagttcaatagaagggggtacaaaccagtaccaccatgaacaagcacttctgtttccccggtgaaatcatagactgtacccacggttgaaagtgatcgatccgtcatccgctcttgtacttcgagaagcctagtatcaccttggaatcttcgatgcgttgcgctcaacactcaaccccagagtgtagcttaggctgatgagtctggacactccccaccggcgacggtggtccaggctgcgttggcggcctacctgtggtccaaagccacaggacgctagttgtgaacaaggtgtgaagagcctattgagctacaggagagtcctccggcccctgaatgcggctaatcccaaccacggagcaggtggtcataatccaatgattggcctgtcgtaacgcgcaagtctgtggcggaaccgactactttgggtgtccgtgtttccttttattttatcattggctgcttatggtgacaatctaagattgccatcatatagcttttggattggccatccggtgatacttcgagttatttagcttgctgcttacatttattttaaacaacatccagttaccagcattcctattttgtttttctttcattctgagttatctaataagtagttaga

SEQ ID NO: 23919 - DNA, 653 bp, synthetic construct
  source 1..653: mol_type = other DNA
ccgtaacttagaagtaacacaaatccaagttcaatagaagggggtacaaaccagtaccaccatgaacaagcacttctgtttccccggtgaaatcatagactgtacccacggttgaaagtgatcgatccgtcatccgctcttgtacttcgagaagcctagtatcaccttggaatcttcgatgcgttgcgctcaacactcaaccccagagtgtagcttaggctgatgagtctggacactccccaccggcgacggtggtccaggctgcgttggcggcctacctgtggtccaaagccacaggacgctagttgtgaacaaggtgtgaagagcctattgagctacaggagagtcctccggcccctgaatgcggctaatcccaaccacggagcaggtggtcataatccaatgattggcctgtcgtaacgcgcaagtctgtggcggaaccgactactttgggtgtccgtgtttccttttattttatcattggctgcttatggtgacaatctaagattgccatcatatagcttttggattggccatccggtgatacttcgagttatttagcttgctgcttacatttattttaaacaacatccagttaccagcattcctattttgtttttctttcattctgagttatctaataagtagttaga

SEQ ID NO: 23920 - DNA, 603 bp, synthetic construct
  source 1..603: mol_type = other DNA
ccagtaccaccatgaacaagcacttctgtttccccggtgaaatcatagactgtacccacggttgaaagtgatcgatccgtcatccgctcttgtacttcgagaagcctagtatcaccttggaatcttcgatgcgttgcgctcaacactcaaccccagagtgtagcttaggctgatgagtctggacactccccaccggcgacggtggtccaggctgcgttggcggcctacctgtggtccaaagccacaggacgctagttgtgaacaaggtgtgaagagcctattgagctacaggagagtcctccggcccctgaatgcggctaatcccaaccacggagcaggtggtcataatccaatgattggcctgtcgtaacgcgcaagtctgtggcggaaccgactactttgggtgtccgtgtttccttttattttatcattggctgcttatggtgacaatctaagattgccatcatatagcttttggattggccatccggtgatacttcgagttatttagcttgctgcttacatttattttaaacaacatccagttaccagcattcctattttgtttttctttcattctgagttatctaataagtagttaga

SEQ ID NO: 23921 - DNA, 553 bp, synthetic construct
  source 1..553: mol_type = other DNA
tgtacccacggttgaaagtgatcgatccgtcatccgctcttgtacttcgagaagcctagtatcaccttggaatcttcgatgcgttgcgctcaacactcaaccccagagtgtagcttaggctgatgagtctggacactccccaccggcgacggtggtccaggctgcgttggcggcctacctgtggtccaaagccacaggacgctagttgtgaacaaggtgtgaagagcctattgagctacaggagagtcctccggcccctgaatgcggctaatcccaaccacggagcaggtggtcataatccaatgattggcctgtcgtaacgcgcaagtctgtggcggaaccgactactttgggtgtccgtgtttccttttattttatcattggctgcttatggtgacaatctaagattgccatcatatagcttttggattggccatccggtgatacttcgagttatttagcttgctgcttacatttattttaaacaacatccagttaccagcattcctattttgtttttctttcattctgagttatctaataagtagttaga

SEQ ID NO: 23922 - DNA, 503 bp, synthetic construct
  source 1..503: mol_type = other DNA
gaagcctagtatcaccttggaatcttcgatgcgttgcgctcaacactcaaccccagagtgtagcttaggctgatgagtctggacactccccaccggcgacggtggtccaggctgcgttggcggcctacctgtggtccaaagccacaggacgctagttgtgaacaaggtgtgaagagcctattgagctacaggagagtcctccggcccctgaatgcggctaatcccaaccacggagcaggtggtcataatccaatgattggcctgtcgtaacgcgcaagtctgtggcggaaccgactactttgggtgtccgtgtttccttttattttatcattggctgcttatggtgacaatctaagattgccatcatatagcttttggattggccatccggtgatacttcgagttatttagcttgctgcttacatttattttaaacaacatccagttaccagcattcctattttgtttttctttcattctgagttatctaataagtagttaga

SEQ ID NO: 23923 - DNA, 704 bp, synthetic construct
  source 1..704: mol_type = other DNA
actgggcgctagcactctgataccacggtacctttgtgcgcctgttttatcaccctaccccacacgaaacttagaagcaatacataactgaccaatagtaggtgtggcgcaccagccacatcttggtcaagcacttctgtctccccgggttgagtatcaataagctgttcacacggctgaaggagaaaacacccgttacccggccaactacttcgagaaacctagtatcaccatgaacgttgcgaggtgtttcgctcagcacttcccccgtgtagatcaggccgatgagtcaccgcattccccacgggtgaccgtggcggtggctgcgttggcggcctgcctatgggttagcccataggacgccttaatactgacatggtgcgaagagtctattgagctagttggtagtcctccggcccctgaatgcggctaatcctaactgcggagcacatacccacaaaccagtgggcggtgtgtcgtaacgggtaactctgcagcggaaccgactactttgggtgtccgtgtttccttttatctttatattggctgcttatggtgacaatcagagaattgttaccatatagctactggattggccatccggtgtccaatagagctattatatacctgtttgttggattcaccccattgacctacaaatccctaaatactttgtgttatattttgaacttaaatacacgaaa

SEQ ID NO: 23924 - DNA, 654 bp, synthetic construct
  source 1..654: mol_type = other DNA
caccctaccccacacgaaacttagaagcaatacataactgaccaatagtaggtgtggcgcaccagccacatcttggtcaagcacttctgtctccccgggttgagtatcaataagctgttcacacggctgaaggagaaaacacccgttacccggccaactacttcgagaaacctagtatcaccatgaacgttgcgaggtgtttcgctcagcacttcccccgtgtagatcaggccgatgagtcaccgcattccccacgggtgaccgtggcggtggctgcgttggcggcctgcctatgggttagcccataggacgccttaatactgacatggtgcgaagagtctattgagctagttggtagtcctccggcccctgaatgcggctaatcctaactgcggagcacatacccacaaaccagtgggcggtgtgtcgtaacgggtaactctgcagcggaaccgactactttgggtgtccgtgtttccttttatctttatattggctgcttatggtgacaatcagagaattgttaccatatagctactggattggccatccggtgtccaatagagctattatatacctgtttgttggattcaccccattgacctacaaatccctaaatactttgtgttatattttgaacttaaatacacgaaa

SEQ ID NO: 23925 - DNA, 604 bp, synthetic construct
  source 1..604: mol_type = other DNA
ggtgtggcgcaccagccacatcttggtcaagcacttctgtctccccgggttgagtatcaataagctgttcacacggctgaaggagaaaacacccgttacccggccaactacttcgagaaacctagtatcaccatgaacgttgcgaggtgtttcgctcagcacttcccccgtgtagatcaggccgatgagtcaccgcattccccacgggtgaccgtggcggtggctgcgttggcggcctgcctatgggttagcccataggacgccttaatactgacatggtgcgaagagtctattgagctagttggtagtcctccggcccctgaatgcggctaatcctaactgcggagcacatacccacaaaccagtgggcggtgtgtcgtaacgggtaactctgcagcggaaccgactactttgggtgtccgtgtttccttttatctttatattggctgcttatggtgacaatcagagaattgttaccatatagctactggattggccatccggtgtccaatagagctattatatacctgtttgttggattcaccccattgacctacaaatccctaaatactttgtgttatattttgaacttaaatacacgaaa

SEQ ID NO: 23926 - DNA, 554 bp, synthetic construct
  source 1..554: mol_type = other DNA
tgagtatcaataagctgttcacacggctgaaggagaaaacacccgttacccggccaactacttcgagaaacctagtatcaccatgaacgttgcgaggtgtttcgctcagcacttcccccgtgtagatcaggccgatgagtcaccgcattccccacgggtgaccgtggcggtggctgcgttggcggcctgcctatgggttagcccataggacgccttaatactgacatggtgcgaagagtctattgagctagttggtagtcctccggcccctgaatgcggctaatcctaactgcggagcacatacccacaaaccagtgggcggtgtgtcgtaacgggtaactctgcagcggaaccgactactttgggtgtccgtgtttccttttatctttatattggctgcttatggtgacaatcagagaattgttaccatatagctactggattggccatccggtgtccaatagagctattatatacctgtttgttggattcaccccattgacctacaaatccctaaatactttgtgttatattttgaacttaaatacacgaaa

SEQ ID NO: 23927 - DNA, 504 bp, synthetic construct
  source 1..504: mol_type = other DNA
cggccaactacttcgagaaacctagtatcaccatgaacgttgcgaggtgtttcgctcagcacttcccccgtgtagatcaggccgatgagtcaccgcattccccacgggtgaccgtggcggtggctgcgttggcggcctgcctatgggttagcccataggacgccttaatactgacatggtgcgaagagtctattgagctagttggtagtcctccggcccctgaatgcggctaatcctaactgcggagcacatacccacaaaccagtgggcggtgtgtcgtaacgggtaactctgcagcggaaccgactactttgggtgtccgtgtttccttttatctttatattggctgcttatggtgacaatcagagaattgttaccatatagctactggattggccatccggtgtccaatagagctattatatacctgtttgttggattcaccccattgacctacaaatccctaaatactttgtgttatattttgaacttaaatacacgaaa

SEQ ID NO: 23928 - DNA, 704 bp, synthetic construct
  source 1..704: mol_type = other DNA
gtactccggtattacggtacccttgtacgcctgttttatatccccttcccctgtaacttagaagcagacaacacaagttcaatagaagggggtacaaaccagtaccaccacgaacaagcacttctgttaccccggtgacgttgcatagactgttcccacggtcaaaagcgatcgatccgttatccgctcaagtacttcgaaaagcctagtatcaccttggaatcttcgatgcgttgcgctcggcactcgatcccggagtgtagcttaggccgatgagtctggacgatcctcactggcgacagtggtccaggctgcgttggcggcctacctatggcccaaagccataggacgctagttgtgaacaaggtgtgaagagcctattgagctacttgagaatcctccggcccctgaatgcggctaatcccaaccacggatcaggtgattgcaatccagcaattggcctgtcgtaacgcgcaagtctgtggcggaaccgactactttgggtgtccgtgtttccttttaattttattgctggctgcttatggtgacaatcgtagattgttatcatagagcgaattggattggccatccggtgagattaaaacacattatttacctttttgttggatttaccacactatctacgtacactccagacttaatccgcatagtacttttaattagaagatcttatcattataaca

SEQ ID NO: 23929 - DNA, 654 bp, synthetic construct
  source 1..654: mol_type = other DNA
ctgtaacttagaagcagacaacacaagttcaatagaagggggtacaaaccagtaccaccacgaacaagcacttctgttaccccggtgacgttgcatagactgttcccacggtcaaaagcgatcgatccgttatccgctcaagtacttcgaaaagcctagtatcaccttggaatcttcgatgcgttgcgctcggcactcgatcccggagtgtagcttaggccgatgagtctggacgatcctcactggcgacagtggtccaggctgcgttggcggcctacctatggcccaaagccataggacgctagttgtgaacaaggtgtgaagagcctattgagctacttgagaatcctccggcccctgaatgcggctaatcccaaccacggatcaggtgattgcaatccagcaattggcctgtcgtaacgcgcaagtctgtggcggaaccgactactttgggtgtccgtgtttccttttaattttattgctggctgcttatggtgacaatcgtagattgttatcatagagcgaattggattggccatccggtgagattaaaacacattatttacctttttgttggatttaccacactatctacgtacactccagacttaatccgcatagtacttttaattagaagatcttatcattataaca

SEQ ID NO: 23930 - DNA, 604 bp, synthetic construct
  source 1..604: mol_type = other DNA
agtaccaccacgaacaagcacttctgttaccccggtgacgttgcatagactgttcccacggtcaaaagcgatcgatccgttatccgctcaagtacttcgaaaagcctagtatcaccttggaatcttcgatgcgttgcgctcggcactcgatcccggagtgtagcttaggccgatgagtctggacgatcctcactggcgacagtggtccaggctgcgttggcggcctacctatggcccaaagccataggacgctagttgtgaacaaggtgtgaagagcctattgagctacttgagaatcctccggcccctgaatgcggctaatcccaaccacggatcaggtgattgcaatccagcaattggcctgtcgtaacgcgcaagtctgtggcggaaccgactactttgggtgtccgtgtttccttttaattttattgctggctgcttatggtgacaatcgtagattgttatcatagagcgaattggattggccatccggtgagattaaaacacattatttacctttttgttggatttaccacactatctacgtacactccagacttaatccgcatagtacttttaattagaagatcttatcattataaca

SEQ ID NO: 23931 - DNA, 554 bp, synthetic construct
  source 1..554: mol_type = other DNA
tgttcccacggtcaaaagcgatcgatccgttatccgctcaagtacttcgaaaagcctagtatcaccttggaatcttcgatgcgttgcgctcggcactcgatcccggagtgtagcttaggccgatgagtctggacgatcctcactggcgacagtggtccaggctgcgttggcggcctacctatggcccaaagccataggacgctagttgtgaacaaggtgtgaagagcctattgagctacttgagaatcctccggcccctgaatgcggctaatcccaaccacggatcaggtgattgcaatccagcaattggcctgtcgtaacgcgcaagtctgtggcggaaccgactactttgggtgtccgtgtttccttttaattttattgctggctgcttatggtgacaatcgtagattgttatcatagagcgaattggattggccatccggtgagattaaaacacattatttacctttttgttggatttaccacactatctacgtacactccagacttaatccgcatagtacttttaattagaagatcttatcattataaca

SEQ ID NO: 23932 - DNA, 504 bp, synthetic construct
  source 1..504: mol_type = other DNA
aaagcctagtatcaccttggaatcttcgatgcgttgcgctcggcactcgatcccggagtgtagcttaggccgatgagtctggacgatcctcactggcgacagtggtccaggctgcgttggcggcctacctatggcccaaagccataggacgctagttgtgaacaaggtgtgaagagcctattgagctacttgagaatcctccggcccctgaatgcggctaatcccaaccacggatcaggtgattgcaatccagcaattggcctgtcgtaacgcgcaagtctgtggcggaaccgactactttgggtgtccgtgtttccttttaattttattgctggctgcttatggtgacaatcgtagattgttatcatagagcgaattggattggccatccggtgagattaaaacacattatttacctttttgttggatttaccacactatctacgtacactccagacttaatccgcatagtacttttaattagaagatcttatcattataaca

SEQ ID NO: 23933 - DNA, 704 bp, synthetic construct
  source 1..704: mol_type = other DNA
gtactccggtatcgaggtacccttgtacgcctgttttatactcccttcccccgtaacttagaagccaaaaatacaagttcaatagaagggggtacaaaccagtaccaccacgaacaagcacttctgttaccccggtgatgttgcatagactgtccccacggtcgaaagcgattgatccgttatccgcttaggtacttcgagaagcctagtatcaccttggaatcttcgatgcgttgcgctcatcactcgaccccggagtgtagcttaggtcgatgagtctggacgatcctcactggcgacagtggtccaggctgcgttggcggcctacctatggcccaaagccataggacgctagttgtgaacaaggtgtgaagagcctattgagctacttaagagtcctccggcccctgaatgcggctaatcccaaccacggatcaggtgattgcaatccagcgattggcctgtcgtaacgcgcaagtctgtggcggaaccgactactttgggtgtccgtgtttccttttaattttattattggctgcttatggtgacaatcatagattgttatcataaagcgaattggattggccatccggtgaaaataaaacacattatctacctttttgttggatttactacactgtctacacacactccagatataatttatatagttcttttaatcaggagatcttatcattataaca

SEQ ID NO: 23934 - DNA, 654 bp, synthetic construct
  source 1..654: mol_type = other DNA
ccgtaacttagaagccaaaaatacaagttcaatagaagggggtacaaaccagtaccaccacgaacaagcacttctgttaccccggtgatgttgcatagactgtccccacggtcgaaagcgattgatccgttatccgcttaggtacttcgagaagcctagtatcaccttggaatcttcgatgcgttgcgctcatcactcgaccccggagtgtagcttaggtcgatgagtctggacgatcctcactggcgacagtggtccaggctgcgttggcggcctacctatggcccaaagccataggacgctagttgtgaacaaggtgtgaagagcctattgagctacttaagagtcctccggcccctgaatgcggctaatcccaaccacggatcaggtgattgcaatccagcgattggcctgtcgtaacgcgcaagtctgtggcggaaccgactactttgggtgtccgtgtttccttttaattttattattggctgcttatggtgacaatcatagattgttatcataaagcgaattggattggccatccggtgaaaataaaacacattatctacctttttgttggatttactacactgtctacacacactccagatataatttatatagttcttttaatcaggagatcttatcattataaca

SEQ ID NO: 23935 - DNA, 604 bp, synthetic construct
  source 1..604: mol_type = other DNA
agtaccaccacgaacaagcacttctgttaccccggtgatgttgcatagactgtccccacggtcgaaagcgattgatccgttatccgcttaggtacttcgagaagcctagtatcaccttggaatcttcgatgcgttgcgctcatcactcgaccccggagtgtagcttaggtcgatgagtctggacgatcctcactggcgacagtggtccaggctgcgttggcggcctacctatggcccaaagccataggacgctagttgtgaacaaggtgtgaagagcctattgagctacttaagagtcctccggcccctgaatgcggctaatcccaaccacggatcaggtgattgcaatccagcgattggcctgtcgtaacgcgcaagtctgtggcggaaccgactactttgggtgtccgtgtttccttttaattttattattggctgcttatggtgacaatcatagattgttatcataaagcgaattggattggccatccggtgaaaataaaacacattatctacctttttgttggatttactacactgtctacacacactccagatataatttatatagttcttttaatcaggagatcttatcattataaca

SEQ ID NO: 23936 - DNA, 554 bp, synthetic construct
  source 1..554: mol_type = other DNA
tgtccccacggtcgaaagcgattgatccgttatccgcttaggtacttcgagaagcctagtatcaccttggaatcttcgatgcgttgcgctcatcactcgaccccggagtgtagcttaggtcgatgagtctggacgatcctcactggcgacagtggtccaggctgcgttggcggcctacctatggcccaaagccataggacgctagttgtgaacaaggtgtgaagagcctattgagctacttaagagtcctccggcccctgaatgcggctaatcccaaccacggatcaggtgattgcaatccagcgattggcctgtcgtaacgcgcaagtctgtggcggaaccgactactttgggtgtccgtgtttccttttaattttattattggctgcttatggtgacaatcatagattgttatcataaagcgaattggattggccatccggtgaaaataaaacacattatctacctttttgttggatttactacactgtctacacacactccagatataatttatatagttcttttaatcaggagatcttatcattataaca

SEQ ID NO: 23937 - DNA, 504 bp, synthetic construct
  source 1..504: mol_type = other DNA
gaagcctagtatcaccttggaatcttcgatgcgttgcgctcatcactcgaccccggagtgtagcttaggtcgatgagtctggacgatcctcactggcgacagtggtccaggctgcgttggcggcctacctatggcccaaagccataggacgctagttgtgaacaaggtgtgaagagcctattgagctacttaagagtcctccggcccctgaatgcggctaatcccaaccacggatcaggtgattgcaatccagcgattggcctgtcgtaacgcgcaagtctgtggcggaaccgactactttgggtgtccgtgtttccttttaattttattattggctgcttatggtgacaatcatagattgttatcataaagcgaattggattggccatccggtgaaaataaaacacattatctacctttttgttggatttactacactgtctacacacactccagatataatttatatagttcttttaatcaggagatcttatcattataaca

SEQ ID NO: 23938 - DNA, 704 bp, synthetic construct
  source 1..704: mol_type = other DNA
tggcggctagtactccggtattacggtacccttgtacgcctgttttatactccccaccccgcaacttagaagaagctaatcaagttcaataggagggggtacaaaccagtaccaccacgaacaagcacttctgtctccccggtgacattgcatagactgtccccacggttgaaagcgatcgatccgttatccgctcttgtacttcgagaagcctagtaccatcttggaatcagcgatgcgttgcgctccgcactcaatcccagagtgtagcttaggctgatgagtctggacattcctcaccggcgacggtggtccaggctgcgttggcggcctacctgtggcccaaagccacaggacgctagttgtgaacaaggtgtgaagagcctattgagctataagagagtcctccggcccctgaatgcggctaatcccaaccacggatcaagggtgcacgaaccagtgtataccttgtcgtaacgcgcaagtctgtggcggaaccgactactttgggtgtccgtgtttccttttattgtttcaatggctgcttatggtgacaatcattgattgttatcataaagcgaattggattggccatccggtgaaagtgaaacatattgtttgcctccttattgggtctactccaatcgacctctttacctacaatcttattgccacagttttactggttagaagtgtgtttcaca

SEQ ID NO: 23939 - DNA, 654 bp, synthetic construct
  source 1..654: mol_type = other DNA
tccccaccccgcaacttagaagaagctaatcaagttcaataggagggggtacaaaccagtaccaccacgaacaagcacttctgtctccccggtgacattgcatagactgtccccacggttgaaagcgatcgatccgttatccgctcttgtacttcgagaagcctagtaccatcttggaatcagcgatgcgttgcgctccgcactcaatcccagagtgtagcttaggctgatgagtctggacattcctcaccggcgacggtggtccaggctgcgttggcggcctacctgtggcccaaagccacaggacgctagttgtgaacaaggtgtgaagagcctattgagctataagagagtcctccggcccctgaatgcggctaatcccaaccacggatcaagggtgcacgaaccagtgtataccttgtcgtaacgcgcaagtctgtggcggaaccgactactttgggtgtccgtgtttccttttattgtttcaatggctgcttatggtgacaatcattgattgttatcataaagcgaattggattggccatccggtgaaagtgaaacatattgtttgcctccttattgggtctactccaatcgacctctttacctacaatcttattgccacagttttactggttagaagtgtgtttcaca

SEQ ID NO: 23940 - DNA, 604 bp, synthetic construct
  source 1..604: mol_type = other DNA
acaaaccagtaccaccacgaacaagcacttctgtctccccggtgacattgcatagactgtccccacggttgaaagcgatcgatccgttatccgctcttgtacttcgagaagcctagtaccatcttggaatcagcgatgcgttgcgctccgcactcaatcccagagtgtagcttaggctgatgagtctggacattcctcaccggcgacggtggtccaggctgcgttggcggcctacctgtggcccaaagccacaggacgctagttgtgaacaaggtgtgaagagcctattgagctataagagagtcctccggcccctgaatgcggctaatcccaaccacggatcaagggtgcacgaaccagtgtataccttgtcgtaacgcgcaagtctgtggcggaaccgactactttgggtgtccgtgtttccttttattgtttcaatggctgcttatggtgacaatcattgattgttatcataaagcgaattggattggccatccggtgaaagtgaaacatattgtttgcctccttattgggtctactccaatcgacctctttacctacaatcttattgccacagttttactggttagaagtgtgtttcaca

SEQ ID NO: 23941 - DNA, 554 bp, synthetic construct
  source 1..554: mol_type = other DNA
catagactgtccccacggttgaaagcgatcgatccgttatccgctcttgtacttcgagaagcctagtaccatcttggaatcagcgatgcgttgcgctccgcactcaatcccagagtgtagcttaggctgatgagtctggacattcctcaccggcgacggtggtccaggctgcgttggcggcctacctgtggcccaaagccacaggacgctagttgtgaacaaggtgtgaagagcctattgagctataagagagtcctccggcccctgaatgcggctaatcccaaccacggatcaagggtgcacgaaccagtgtataccttgtcgtaacgcgcaagtctgtggcggaaccgactactttgggtgtccgtgtttccttttattgtttcaatggctgcttatggtgacaatcattgattgttatcataaagcgaattggattggccatccggtgaaagtgaaacatattgtttgcctccttattgggtctactccaatcgacctctttacctacaatcttattgccacagttttactggttagaagtgtgtttcaca

SEQ ID NO: 23942 - DNA, 504 bp, synthetic construct
  source 1..504: mol_type = other DNA
acttcgagaagcctagtaccatcttggaatcagcgatgcgttgcgctccgcactcaatcccagagtgtagcttaggctgatgagtctggacattcctcaccggcgacggtggtccaggctgcgttggcggcctacctgtggcccaaagccacaggacgctagttgtgaacaaggtgtgaagagcctattgagctataagagagtcctccggcccctgaatgcggctaatcccaaccacggatcaagggtgcacgaaccagtgtataccttgtcgtaacgcgcaagtctgtggcggaaccgactactttgggtgtccgtgtttccttttattgtttcaatggctgcttatggtgacaatcattgattgttatcataaagcgaattggattggccatccggtgaaagtgaaacatattgtttgcctccttattgggtctactccaatcgacctctttacctacaatcttattgccacagttttactggttagaagtgtgtttcaca

SEQ ID NO: 23943 - DNA, 705 bp, synthetic construct
  source 1..705: mol_type = other DNA
acttcggtttctggacaaatacaaagaacctcagtcctcttggtactttctcgcctgagtcaacaaagcgagaaacctgcccctctaacgccagacgagcggcataaaacttgaacttctggcacgctccactcttccctctcccaatcccatccccatcgcgctctcaaggtcgcgcaattctgggactagcccagatttaaaagttcctggcaccctttgcccctttaggcccttaaggcaggaactgaccttgtgctgtgacctcggtgcggaagtgctactgcgtagtgattgtaagctcctcttatggttctgccctggcaaggctatagagtactgtgatccgctgcggatgccatcctggtaacaggacccccagtgtgcgtaacagtatgttcacggctcaccgtgttcaccatgactggaacactgctttcgtgaaacagtgtgtgtccaatccctgtgatcagtatcaaccacaccacctaggaatgctaggaaggtaccccggttcgccgggatctgatcctaggctaattgtctacagtggtgctcctttattttctctccaaccatttattgttcacaactgcttgatcttgtgtttgctgcctttctctgctctcactgccattctcaagtgttcacactgtccaagctcctttggttgttttcatccacttgccattgtcaactcttgtc

SEQ ID NO: 23944 - DNA, 655 bp, synthetic construct
  source 1..655: mol_type = other DNA
tcgcctgagtcaacaaagcgagaaacctgcccctctaacgccagacgagcggcataaaacttgaacttctggcacgctccactcttccctctcccaatcccatccccatcgcgctctcaaggtcgcgcaattctgggactagcccagatttaaaagttcctggcaccctttgcccctttaggcccttaaggcaggaactgaccttgtgctgtgacctcggtgcggaagtgctactgcgtagtgattgtaagctcctcttatggttctgccctggcaaggctatagagtactgtgatccgctgcggatgccatcctggtaacaggacccccagtgtgcgtaacagtatgttcacggctcaccgtgttcaccatgactggaacactgctttcgtgaaacagtgtgtgtccaatccctgtgatcagtatcaaccacaccacctaggaatgctaggaaggtaccccggttcgccgggatctgatcctaggctaattgtctacagtggtgctcctttattttctctccaaccatttattgttcacaactgcttgatcttgtgtttgctgcctttctctgctctcactgccattctcaagtgttcacactgtccaagctcctttggttgttttcatccacttgccattgtcaactcttgtc

SEQ ID NO: 23945 - DNA, 605 bp, synthetic construct
  source 1..605: mol_type = other DNA
ggcataaaacttgaacttctggcacgctccactcttccctctcccaatcccatccccatcgcgctctcaaggtcgcgcaattctgggactagcccagatttaaaagttcctggcaccctttgcccctttaggcccttaaggcaggaactgaccttgtgctgtgacctcggtgcggaagtgctactgcgtagtgattgtaagctcctcttatggttctgccctggcaaggctatagagtactgtgatccgctgcggatgccatcctggtaacaggacccccagtgtgcgtaacagtatgttcacggctcaccgtgttcaccatgactggaacactgctttcgtgaaacagtgtgtgtccaatccctgtgatcagtatcaaccacaccacctaggaatgctaggaaggtaccccggttcgccgggatctgatcctaggctaattgtctacagtggtgctcctttattttctctccaaccatttattgttcacaactgcttgatcttgtgtttgctgcctttctctgctctcactgccattctcaagtgttcacactgtccaagctcctttggttgttttcatccacttgccattgtcaactcttgtc

SEQ ID NO: 23946 - DNA, 555 bp, synthetic construct
  source 1..555: mol_type = other DNA
catccccatcgcgctctcaaggtcgcgcaattctgggactagcccagatttaaaagttcctggcaccctttgcccctttaggcccttaaggcaggaactgaccttgtgctgtgacctcggtgcggaagtgctactgcgtagtgattgtaagctcctcttatggttctgccctggcaaggctatagagtactgtgatccgctgcggatgccatcctggtaacaggacccccagtgtgcgtaacagtatgttcacggctcaccgtgttcaccatgactggaacactgctttcgtgaaacagtgtgtgtccaatccctgtgatcagtatcaaccacaccacctaggaatgctaggaaggtaccccggttcgccgggatctgatcctaggctaattgtctacagtggtgctcctttattttctctccaaccatttattgttcacaactgcttgatcttgtgtttgctgcctttctctgctctcactgccattctcaagtgttcacactgtccaagctcctttggttgttttcatccacttgccattgtcaactcttgtc

SEQ ID NO: 23947 - DNA, 505 bp, synthetic construct
  source 1..505: mol_type = other DNA
taaaagttcctggcaccctttgcccctttaggcccttaaggcaggaactgaccttgtgctgtgacctcggtgcggaagtgctactgcgtagtgattgtaagctcctcttatggttctgccctggcaaggctatagagtactgtgatccgctgcggatgccatcctggtaacaggacccccagtgtgcgtaacagtatgttcacggctcaccgtgttcaccatgactggaacactgctttcgtgaaacagtgtgtgtccaatccctgtgatcagtatcaaccacaccacctaggaatgctaggaaggtaccccggttcgccgggatctgatcctaggctaattgtctacagtggtgctcctttattttctctccaaccatttattgttcacaactgcttgatcttgtgtttgctgcctttctctgctctcactgccattctcaagtgttcacactgtccaagctcctttggttgttttcatccacttgccattgtcaactcttgtc

SEQ ID NO: 23948 - DNA, 705 bp, synthetic construct
  source 1..705: mol_type = other DNA
cacactgattctgcgggatctttgtgcgcctgttttatatcccctccccccaaactaggtaacttagaagattagcacttgtatgaccaatagtaggcgtgacgcgccagtcatgtcttggtcaagcacttctgtttccccggactgagtatcaataagctgcttgcgcggctgaaggagaaaacgttcgttacccggctaactacttcgagaaacctagtaacaccatgaaagttgcggagtgtttcgctcagcacttcccccgtgtagatcaggtcgatgagtcactgcaaaccccacgggtgaccgtggcagtggctgcgttggcggcctgcctatgggtcaacccataggacgctctaatacagacatggtgtgaagagtctattgagctagttagtagtcctccggcccctgaatgcggctaatcctaactgcggagcacacgcttgcaaaccagtgagtagtgtgtcgtaatgggcaactctgcagcggaaccgactactttgggtgtccgtgtttccttttattctcatactggctgcttatggtgacaattgaagaattgttactatatagctattggattggccatccggtgtgtaacagagcgataatctactcctttgttgcatttgttccactaacccttactacattagacattctacaatacatactttatctcaactccaagaaacgaac

SEQ ID NO: 23949 - DNA, 655 bp, synthetic construct
  source 1..655: mol_type = other DNA
caaactaggtaacttagaagattagcacttgtatgaccaatagtaggcgtgacgcgccagtcatgtcttggtcaagcacttctgtttccccggactgagtatcaataagctgcttgcgcggctgaaggagaaaacgttcgttacccggctaactacttcgagaaacctagtaacaccatgaaagttgcggagtgtttcgctcagcacttcccccgtgtagatcaggtcgatgagtcactgcaaaccccacgggtgaccgtggcagtggctgcgttggcggcctgcctatgggtcaacccataggacgctctaatacagacatggtgtgaagagtctattgagctagttagtagtcctccggcccctgaatgcggctaatcctaactgcggagcacacgcttgcaaaccagtgagtagtgtgtcgtaatgggcaactctgcagcggaaccgactactttgggtgtccgtgtttccttttattctcatactggctgcttatggtgacaattgaagaattgttactatatagctattggattggccatccggtgtgtaacagagcgataatctactcctttgttgcatttgttccactaacccttactacattagacattctacaatacatactttatctcaactccaagaaacgaac

SEQ ID NO: 23950 - DNA, 605 bp, synthetic construct
  source 1..605: mol_type = other DNA
gacgcgccagtcatgtcttggtcaagcacttctgtttccccggactgagtatcaataagctgcttgcgcggctgaaggagaaaacgttcgttacccggctaactacttcgagaaacctagtaacaccatgaaagttgcggagtgtttcgctcagcacttcccccgtgtagatcaggtcgatgagtcactgcaaaccccacgggtgaccgtggcagtggctgcgttggcggcctgcctatgggtcaacccataggacgctctaatacagacatggtgtgaagagtctattgagctagttagtagtcctccggcccctgaatgcggctaatcctaactgcggagcacacgcttgcaaaccagtgagtagtgtgtcgtaatgggcaactctgcagcggaaccgactactttgggtgtccgtgtttccttttattctcatactggctgcttatggtgacaattgaagaattgttactatatagctattggattggccatccggtgtgtaacagagcgataatctactcctttgttgcatttgttccactaacccttactacattagacattctacaatacatactttatctcaactccaagaaacgaac

SEQ ID NO: 23951 - DNA, 555 bp, synthetic construct
  source 1..555: mol_type = other DNA
atcaataagctgcttgcgcggctgaaggagaaaacgttcgttacccggctaactacttcgagaaacctagtaacaccatgaaagttgcggagtgtttcgctcagcacttcccccgtgtagatcaggtcgatgagtcactgcaaaccccacgggtgaccgtggcagtggctgcgttggcggcctgcctatgggtcaacccataggacgctctaatacagacatggtgtgaagagtctattgagctagttagtagtcctccggcccctgaatgcggctaatcctaactgcggagcacacgcttgcaaaccagtgagtagtgtgtcgtaatgggcaactctgcagcggaaccgactactttgggtgtccgtgtttccttttattctcatactggctgcttatggtgacaattgaagaattgttactatatagctattggattggccatccggtgtgtaacagagcgataatctactcctttgttgcatttgttccactaacccttactacattagacattctacaatacatactttatctcaactccaagaaacgaac

SEQ ID NO: 23952 - DNA, 505 bp, synthetic construct
  source 1..505: mol_type = other DNA
aactacttcgagaaacctagtaacaccatgaaagttgcggagtgtttcgctcagcacttcccccgtgtagatcaggtcgatgagtcactgcaaaccccacgggtgaccgtggcagtggctgcgttggcggcctgcctatgggtcaacccataggacgctctaatacagacatggtgtgaagagtctattgagctagttagtagtcctccggcccctgaatgcggctaatcctaactgcggagcacacgcttgcaaaccagtgagtagtgtgtcgtaatgggcaactctgcagcggaaccgactactttgggtgtccgtgtttccttttattctcatactggctgcttatggtgacaattgaagaattgttactatatagctattggattggccatccggtgtgtaacagagcgataatctactcctttgttgcatttgttccactaacccttactacattagacattctacaatacatactttatctcaactccaagaaacgaac

SEQ ID NO: 23953 - DNA, 708 bp, synthetic construct
  source 1..708: mol_type = other DNA
gcccattgggcgctagcactctggtaccacggtacctttgtgcgcctgttttatcaccctaacccccacgaaacttagaagtaacacataaccgaccaatagtaggtgtggcgcaccagccgcatcttggtcaagcacttctgtttccccgggttgagtatcaataagctgttcacacggctgaaggagaaaacacccgttacccgaccaactacttcgagaaacctagtaccaccatgaacgttgcaaggcgtttcgctcagcacttcccccgtgtagatcaggccgatgagtcaccgcattccccacgggtgaccgtggcggtggctgcgttggcggcctgcctatgggttagcccataggacgccttaatactgacatggtgcgaagagtctattgagctagttggtagtcctccggcccctgaatgcggataatcctaactgcggagcacatactcacaaaccagtgagctgtgtgtcgtaacgggcaactctgcagcggaaccgactactttgggagaccgtgtttccttttatctttatattggctgcttatggtgacaatcagagaattgttgccatatagctattggattggccatccggtgtctaatagagctattatatacctgtttgttggattcactccgctgacacataaatcccttaatactttgtgttatatcttgaacttaaacacacgaaa

SEQ ID NO: 23954 - DNA, 658 bp, synthetic construct
  source 1..658: mol_type = other DNA
ttatcaccctaacccccacgaaacttagaagtaacacataaccgaccaatagtaggtgtggcgcaccagccgcatcttggtcaagcacttctgtttccccgggttgagtatcaataagctgttcacacggctgaaggagaaaacacccgttacccgaccaactacttcgagaaacctagtaccaccatgaacgttgcaaggcgtttcgctcagcacttcccccgtgtagatcaggccgatgagtcaccgcattccccacgggtgaccgtggcggtggctgcgttggcggcctgcctatgggttagcccataggacgccttaatactgacatggtgcgaagagtctattgagctagttggtagtcctccggcccctgaatgcggataatcctaactgcggagcacatactcacaaaccagtgagctgtgtgtcgtaacgggcaactctgcagcggaaccgactactttgggagaccgtgtttccttttatctttatattggctgcttatggtgacaatcagagaattgttgccatatagctattggattggccatccggtgtctaatagagctattatatacctgtttgttggattcactccgctgacacataaatcccttaatactttgtgttatatcttgaacttaaacacacgaaa

SEQ ID NO: 23955 - DNA, 608 bp, synthetic construct
  source 1..608: mol_type = other DNA
agtaggtgtggcgcaccagccgcatcttggtcaagcacttctgtttccccgggttgagtatcaataagctgttcacacggctgaaggagaaaacacccgttacccgaccaactacttcgagaaacctagtaccaccatgaacgttgcaaggcgtttcgctcagcacttcccccgtgtagatcaggccgatgagtcaccgcattccccacgggtgaccgtggcggtggctgcgttggcggcctgcctatgggttagcccataggacgccttaatactgacatggtgcgaagagtctattgagctagttggtagtcctccggcccctgaatgcggataatcctaactgcggagcacatactcacaaaccagtgagctgtgtgtcgtaacgggcaactctgcagcggaaccgactactttgggagaccgtgtttccttttatctttatattggctgcttatggtgacaatcagagaattgttgccatatagctattggattggccatccggtgtctaatagagctattatatacctgtttgttggattcactccgctgacacataaatcccttaatactttgtgttatatcttgaacttaaacacacgaaa

SEQ ID NO: 23956 - DNA, 558 bp, synthetic construct
  source 1..558: mol_type = other DNA
gggttgagtatcaataagctgttcacacggctgaaggagaaaacacccgttacccgaccaactacttcgagaaacctagtaccaccatgaacgttgcaaggcgtttcgctcagcacttcccccgtgtagatcaggccgatgagtcaccgcattccccacgggtgaccgtggcggtggctgcgttggcggcctgcctatgggttagcccataggacgccttaatactgacatggtgcgaagagtctattgagctagttggtagtcctccggcccctgaatgcggataatcctaactgcggagcacatactcacaaaccagtgagctgtgtgtcgtaacgggcaactctgcagcggaaccgactactttgggagaccgtgtttccttttatctttatattggctgcttatggtgacaatcagagaattgttgccatatagctattggattggccatccggtgtctaatagagctattatatacctgtttgttggattcactccgctgacacataaatcccttaatactttgtgttatatcttgaacttaaacacacgaaa

SEQ ID NO: 23957 - DNA, 508 bp, synthetic construct
  source 1..508: mol_type = other DNA
tacccgaccaactacttcgagaaacctagtaccaccatgaacgttgcaaggcgtttcgctcagcacttcccccgtgtagatcaggccgatgagtcaccgcattccccacgggtgaccgtggcggtggctgcgttggcggcctgcctatgggttagcccataggacgccttaatactgacatggtgcgaagagtctattgagctagttggtagtcctccggcccctgaatgcggataatcctaactgcggagcacatactcacaaaccagtgagctgtgtgtcgtaacgggcaactctgcagcggaaccgactactttgggagaccgtgtttccttttatctttatattggctgcttatggtgacaatcagagaattgttgccatatagctattggattggccatccggtgtctaatagagctattatatacctgtttgttggattcactccgctgacacataaatcccttaatactttgtgttatatcttgaacttaaacacacgaaa

SEQ ID NO: 23958 - DNA, 708 bp, synthetic construct
  source 1..708: mol_type = other DNA
gcccactgggcgctagcactctggtatcacggtacctttgtgcgcctgtttttccacccctccccatacgcaacttagaagagagactcaaccggtcaatagacagcctagtacaccaactaggttctgaccaagaacttctgtttccccggaccgagtatcaataggctgcttacgcggctgaaggagaaaacgttcgttacccggccaattacttcgagaaacctagtatcaccatggaagttgcgcagtgtttcgctccgcacaaccccagtgtagatcaggtcgatgagtcaccgcattccccacaggcgactgtggcggtggctgcgttggcggcctgcccgtggggcaacccacgggacgcttcaataccgacatggtgcgaagagtctattgagctaattggtagtcctccggcccctgaatgcggctaatcctaactgtggagcagatacccacgcgccagtgggcagtctgtcgtaatgggcaactccgcagcggaaccgactactttgggtgtccgtgtttccttttatcctcataatggctgcttatggtgacaattgaaagattgttgccatatagctattggattggccatccggtgactaacagagcaattatttacttgtttgttgggtttgtaccattgaactacaaggtccttaatactctaaactacattataagtctcaatacagtgca

SEQ ID NO: 23959 - DNA, 658 bp, synthetic construct
  source 1..658: mol_type = other DNA
tttccacccctccccatacgcaacttagaagagagactcaaccggtcaatagacagcctagtacaccaactaggttctgaccaagaacttctgtttccccggaccgagtatcaataggctgcttacgcggctgaaggagaaaacgttcgttacccggccaattacttcgagaaacctagtatcaccatggaagttgcgcagtgtttcgctccgcacaaccccagtgtagatcaggtcgatgagtcaccgcattccccacaggcgactgtggcggtggctgcgttggcggcctgcccgtggggcaacccacgggacgcttcaataccgacatggtgcgaagagtctattgagctaattggtagtcctccggcccctgaatgcggctaatcctaactgtggagcagatacccacgcgccagtgggcagtctgtcgtaatgggcaactccgcagcggaaccgactactttgggtgtccgtgtttccttttatcctcataatggctgcttatggtgacaattgaaagattgttgccatatagctattggattggccatccggtgactaacagagcaattatttacttgtttgttgggtttgtaccattgaactacaaggtccttaatactctaaactacattataagtctcaatacagtgca

SEQ ID NO: 23960 - DNA, 608 bp, synthetic construct
  source 1..608: mol_type = other DNA
agacagcctagtacaccaactaggttctgaccaagaacttctgtttccccggaccgagtatcaataggctgcttacgcggctgaaggagaaaacgttcgttacccggccaattacttcgagaaacctagtatcaccatggaagttgcgcagtgtttcgctccgcacaaccccagtgtagatcaggtcgatgagtcaccgcattccccacaggcgactgtggcggtggctgcgttggcggcctgcccgtggggcaacccacgggacgcttcaataccgacatggtgcgaagagtctattgagctaattggtagtcctccggcccctgaatgcggctaatcctaactgtggagcagatacccacgcgccagtgggcagtctgtcgtaatgggcaactccgcagcggaaccgactactttgggtgtccgtgtttccttttatcctcataatggctgcttatggtgacaattgaaagattgttgccatatagctattggattggccatccggtgactaacagagcaattatttacttgtttgttgggtttgtaccattgaactacaaggtccttaatactctaaactacattataagtctcaatacagtgca

SEQ ID NO: 23961 - DNA, 558 bp, synthetic construct
  source 1..558: mol_type = other DNA
ggaccgagtatcaataggctgcttacgcggctgaaggagaaaacgttcgttacccggccaattacttcgagaaacctagtatcaccatggaagttgcgcagtgtttcgctccgcacaaccccagtgtagatcaggtcgatgagtcaccgcattccccacaggcgactgtggcggtggctgcgttggcggcctgcccgtggggcaacccacgggacgcttcaataccgacatggtgcgaagagtctattgagctaattggtagtcctccggcccctgaatgcggctaatcctaactgtggagcagatacccacgcgccagtgggcagtctgtcgtaatgggcaactccgcagcggaaccgactactttgggtgtccgtgtttccttttatcctcataatggctgcttatggtgacaattgaaagattgttgccatatagctattggattggccatccggtgactaacagagcaattatttacttgtttgttgggtttgtaccattgaactacaaggtccttaatactctaaactacattataagtctcaatacagtgca

SEQ ID NO: 23962 - DNA, 508 bp, synthetic construct
  source 1..508: mol_type = other DNA
tacccggccaattacttcgagaaacctagtatcaccatggaagttgcgcagtgtttcgctccgcacaaccccagtgtagatcaggtcgatgagtcaccgcattccccacaggcgactgtggcggtggctgcgttggcggcctgcccgtggggcaacccacgggacgcttcaataccgacatggtgcgaagagtctattgagctaattggtagtcctccggcccctgaatgcggctaatcctaactgtggagcagatacccacgcgccagtgggcagtctgtcgtaatgggcaactccgcagcggaaccgactactttgggtgtccgtgtttccttttatcctcataatggctgcttatggtgacaattgaaagattgttgccatatagctattggattggccatccggtgactaacagagcaattatttacttgtttgttgggtttgtaccattgaactacaaggtccttaatactctaaactacattataagtctcaatacagtgca

SEQ ID NO: 23963 - DNA, 709 bp, synthetic construct
  source 1..709: mol_type = other DNA
cccactgggcgctagcacactggttctgcgggacctttgtgcgcctgttttataacccttccctaagcagtaacttagaagctttgtacaatcatggccaatagtgggcgtggcgcgccagtcacgtcttggtcaagcacttctgtatccccggactgagtatcaatagactgctcacgtggttgaaggagaaaacgtccgttacccggctaactacttcgagaaacctagtagcaccatgaaagttgcggagtgtttcgttcagcacttcccccgtgtagatcaggtcgatgagtcactgtaaaccccacgggcgaccgtgacagtggctgcgttggcggcctgcccatggggtaacccatgggacgctctaatacagacatggtgcgaagagtctattgagctagttagcagtcctccggcccctgaatgcggctaatcctaactgcggagcgcgcaccctcaacccagggggcggcgcgtcgtaatgggcaactctgcagcggaaccgactactttgggtgtccgtgtttccttttattctttattggctgcttatggtgacaattgaaaagttgttaccatatagctattggattggccatccggtgtctaacagagctattgtttacctattcattggattcgtccctcttaatctcaaggtcattcaaactctcgattgcatattgctccttaactgtaagaa

SEQ ID NO: 23964 - DNA, 659 bp, synthetic construct
  source 1..659: mol_type = other DNA
tataacccttccctaagcagtaacttagaagctttgtacaatcatggccaatagtgggcgtggcgcgccagtcacgtcttggtcaagcacttctgtatccccggactgagtatcaatagactgctcacgtggttgaaggagaaaacgtccgttacccggctaactacttcgagaaacctagtagcaccatgaaagttgcggagtgtttcgttcagcacttcccccgtgtagatcaggtcgatgagtcactgtaaaccccacgggcgaccgtgacagtggctgcgttggcggcctgcccatggggtaacccatgggacgctctaatacagacatggtgcgaagagtctattgagctagttagcagtcctccggcccctgaatgcggctaatcctaactgcggagcgcgcaccctcaacccagggggcggcgcgtcgtaatgggcaactctgcagcggaaccgactactttgggtgtccgtgtttccttttattctttattggctgcttatggtgacaattgaaaagttgttaccatatagctattggattggccatccggtgtctaacagagctattgtttacctattcattggattcgtccctcttaatctcaaggtcattcaaactctcgattgcatattgctccttaactgtaagaa

SEQ ID NO: 23965 - DNA, 609 bp, synthetic construct
  source 1..609: mol_type = other DNA
atagtgggcgtggcgcgccagtcacgtcttggtcaagcacttctgtatccccggactgagtatcaatagactgctcacgtggttgaaggagaaaacgtccgttacccggctaactacttcgagaaacctagtagcaccatgaaagttgcggagtgtttcgttcagcacttcccccgtgtagatcaggtcgatgagtcactgtaaaccccacgggcgaccgtgacagtggctgcgttggcggcctgcccatggggtaacccatgggacgctctaatacagacatggtgcgaagagtctattgagctagttagcagtcctccggcccctgaatgcggctaatcctaactgcggagcgcgcaccctcaacccagggggcggcgcgtcgtaatgggcaactctgcagcggaaccgactactttgggtgtccgtgtttccttttattctttattggctgcttatggtgacaattgaaaagttgttaccatatagctattggattggccatccggtgtctaacagagctattgtttacctattcattggattcgtccctcttaatctcaaggtcattcaaactctcgattgcatattgctccttaactgtaagaa

SEQ ID NO: 23966 - DNA, 559 bp, synthetic construct
  source 1..559: mol_type = other DNA
ccggactgagtatcaatagactgctcacgtggttgaaggagaaaacgtccgttacccggctaactacttcgagaaacctagtagcaccatgaaagttgcggagtgtttcgttcagcacttcccccgtgtagatcaggtcgatgagtcactgtaaaccccacgggcgaccgtgacagtggctgcgttggcggcctgcccatggggtaacccatgggacgctctaatacagacatggtgcgaagagtctattgagctagttagcagtcctccggcccctgaatgcggctaatcctaactgcggagcgcgcaccctcaacccagggggcggcgcgtcgtaatgggcaactctgcagcggaaccgactactttgggtgtccgtgtttccttttattctttattggctgcttatggtgacaattgaaaagttgttaccatatagctattggattggccatccggtgtctaacagagctattgtttacctattcattggattcgtccctcttaatctcaaggtcattcaaactctcgattgcatattgctccttaactgtaagaa

SEQ ID NO: 23967 - DNA, 509 bp, synthetic construct
  source 1..509: mol_type = other DNA
gttacccggctaactacttcgagaaacctagtagcaccatgaaagttgcggagtgtttcgttcagcacttcccccgtgtagatcaggtcgatgagtcactgtaaaccccacgggcgaccgtgacagtggctgcgttggcggcctgcccatggggtaacccatgggacgctctaatacagacatggtgcgaagagtctattgagctagttagcagtcctccggcccctgaatgcggctaatcctaactgcggagcgcgcaccctcaacccagggggcggcgcgtcgtaatgggcaactctgcagcggaaccgactactttgggtgtccgtgtttccttttattctttattggctgcttatggtgacaattgaaaagttgttaccatatagctattggattggccatccggtgtctaacagagctattgtttacctattcattggattcgtccctcttaatctcaaggtcattcaaactctcgattgcatattgctccttaactgtaagaa

SEQ ID NO: 23968 - DNA, 712 bp, synthetic construct
  source 1..712: mol_type = other DNA
gcccactgggcgctagcacactgattctgcgggatctttgtgcgcctgttttataacccctcccctaagcagtaacttagaagcttcacactattacgaccaatagtaggcgtggcgcgccagtcacgttttggtcaagcacttctgtctccccggactgagtatcaatagactgctcacgcggttgaaggagaaaacgttcgttatccggctaactacttcgagaaacctagtagcaccgtgaaagttgcggagtgtttcgctcagcacttcccccgtgtagatcaggtcgatgagtcactgtgaaccccacgggtgaccgtgacagtggctgcgttggcggcctgcccatggggtgacccatgggacgctctaatacagacacggtgtgaagagtctattgagctagttagtagtcctccggcccctgaatgcggctaatcctaactgcggagcgcgcaccctcaatccagggggccagcgcgtcgtaatgggtaactctgcagcggaaccgactactttgggtgtccgtgtttccttttattccttattggctgcttatggtgacaattgaaaagttgttaccatatagctattggattggccatccggtgaccaacagagctattgtttacctgtttattggatacgtccctctcaatctcaaagccattcaaactcttgattacatattacttcttaactgtaagaa

SEQ ID NO: 23969 - DNA, 662 bp, synthetic construct
  source 1..662: mol_type = other DNA
ttataacccctcccctaagcagtaacttagaagcttcacactattacgaccaatagtaggcgtggcgcgccagtcacgttttggtcaagcacttctgtctccccggactgagtatcaatagactgctcacgcggttgaaggagaaaacgttcgttatccggctaactacttcgagaaacctagtagcaccgtgaaagttgcggagtgtttcgctcagcacttcccccgtgtagatcaggtcgatgagtcactgtgaaccccacgggtgaccgtgacagtggctgcgttggcggcctgcccatggggtgacccatgggacgctctaatacagacacggtgtgaagagtctattgagctagttagtagtcctccggcccctgaatgcggctaatcctaactgcggagcgcgcaccctcaatccagggggccagcgcgtcgtaatgggtaactctgcagcggaaccgactactttgggtgtccgtgtttccttttattccttattggctgcttatggtgacaattgaaaagttgttaccatatagctattggattggccatccggtgaccaacagagctattgtttacctgtttattggatacgtccctctcaatctcaaagccattcaaactcttgattacatattacttcttaactgtaagaa

SEQ ID NO: 23970 - DNA, 612 bp, synthetic construct
  source 1..612: mol_type = other DNA
caatagtaggcgtggcgcgccagtcacgttttggtcaagcacttctgtctccccggactgagtatcaatagactgctcacgcggttgaaggagaaaacgttcgttatccggctaactacttcgagaaacctagtagcaccgtgaaagttgcggagtgtttcgctcagcacttcccccgtgtagatcaggtcgatgagtcactgtgaaccccacgggtgaccgtgacagtggctgcgttggcggcctgcccatggggtgacccatgggacgctctaatacagacacggtgtgaagagtctattgagctagttagtagtcctccggcccctgaatgcggctaatcctaactgcggagcgcgcaccctcaatccagggggccagcgcgtcgtaatgggtaactctgcagcggaaccgactactttgggtgtccgtgtttccttttattccttattggctgcttatggtgacaattgaaaagttgttaccatatagctattggattggccatccggtgaccaacagagctattgtttacctgtttattggatacgtccctctcaatctcaaagccattcaaactcttgattacatattacttcttaactgtaagaa

SEQ ID NO: 23971 - DNA, 562 bp, synthetic construct
  source 1..562: mol_type = other DNA
ccccggactgagtatcaatagactgctcacgcggttgaaggagaaaacgttcgttatccggctaactacttcgagaaacctagtagcaccgtgaaagttgcggagtgtttcgctcagcacttcccccgtgtagatcaggtcgatgagtcactgtgaaccccacgggtgaccgtgacagtggctgcgttggcggcctgcccatggggtgacccatgggacgctctaatacagacacggtgtgaagagtctattgagctagttagtagtcctccggcccctgaatgcggctaatcctaactgcggagcgcgcaccctcaatccagggggccagcgcgtcgtaatgggtaactctgcagcggaaccgactactttgggtgtccgtgtttccttttattccttattggctgcttatggtgacaattgaaaagttgttaccatatagctattggattggccatccggtgaccaacagagctattgtttacctgtttattggatacgtccctctcaatctcaaagccattcaaactcttgattacatattacttcttaactgtaagaa

SEQ ID NO: 23972 - DNA, 512 bp, synthetic construct
  source 1..512: mol_type = other DNA
tcgttatccggctaactacttcgagaaacctagtagcaccgtgaaagttgcggagtgtttcgctcagcacttcccccgtgtagatcaggtcgatgagtcactgtgaaccccacgggtgaccgtgacagtggctgcgttggcggcctgcccatggggtgacccatgggacgctctaatacagacacggtgtgaagagtctattgagctagttagtagtcctccggcccctgaatgcggctaatcctaactgcggagcgcgcaccctcaatccagggggccagcgcgtcgtaatgggtaactctgcagcggaaccgactactttgggtgtccgtgtttccttttattccttattggctgcttatggtgacaattgaaaagttgttaccatatagctattggattggccatccggtgaccaacagagctattgtttacctgtttattggatacgtccctctcaatctcaaagccattcaaactcttgattacatattacttcttaactgtaagaa

SEQ ID NO: 23973 - DNA, 716 bp, synthetic construct
  source 1..716: mol_type = other DNA
tcagctacttcggtacctgttcggaggaattaaacgggcaccctacccaagggttacatgggaccatattcctcctcccctgtaactttaagttttgtgcccgtattcttgactccaggcggatgttgtgtcgcccgtcctgtgaacaaacagctagacactttcctcccctccctctgggctgctccggcagtccactccctccccccagcgtaacatgccccgctggagtgatgcacctggaagtcgtggacgtgggttagtaacttcggtgaaaacccactataatgacaactggttgacccccacactcaaaggactcgagtctttctcccttaaggctagcccggccacatgaatttgcagctggcaactagtgagtccaccatgtcccgcaacctcggctgcggagtgctgttccccaagcgtatgccttccttctgtaagagtgcgcctggcaagcacatctgagaagtcgttccgctgcgtcgtgccaacctggcgacaggtgacccagtgtgcgtagacttcttccggattcgtccggctcttctctaggaaacatgcgtgtaaggttcatgtgccaaagccctgcgcgcggtgttcttctactgccctaggaatgtgccgcaggtacccctacttcggtagggatctgagcggtagctaattgtctacgggtagtttcatttccatcttctcttcaggtcgacatc

SEQ ID NO: 23974 - DNA, 666 bp, synthetic construct
  source 1..666: mol_type = other DNA
gggttacatgggaccatattcctcctcccctgtaactttaagttttgtgcccgtattcttgactccaggcggatgttgtgtcgcccgtcctgtgaacaaacagctagacactttcctcccctccctctgggctgctccggcagtccactccctccccccagcgtaacatgccccgctggagtgatgcacctggaagtcgtggacgtgggttagtaacttcggtgaaaacccactataatgacaactggttgacccccacactcaaaggactcgagtctttctcccttaaggctagcccggccacatgaatttgcagctggcaactagtgagtccaccatgtcccgcaacctcggctgcggagtgctgttccccaagcgtatgccttccttctgtaagagtgcgcctggcaagcacatctgagaagtcgttccgctgcgtcgtgccaacctggcgacaggtgacccagtgtgcgtagacttcttccggattcgtccggctcttctctaggaaacatgcgtgtaaggttcatgtgccaaagccctgcgcgcggtgttcttctactgccctaggaatgtgccgcaggtacccctacttcggtagggatctgagcggtagctaattgtctacgggtagtttcatttccatcttctcttcaggtcgacatc

SEQ ID NO: 23975 - DNA, 616 bp, synthetic construct
  source 1..616: mol_type = other DNA
ccgtattcttgactccaggcggatgttgtgtcgcccgtcctgtgaacaaacagctagacactttcctcccctccctctgggctgctccggcagtccactccctccccccagcgtaacatgccccgctggagtgatgcacctggaagtcgtggacgtgggttagtaacttcggtgaaaacccactataatgacaactggttgacccccacactcaaaggactcgagtctttctcccttaaggctagcccggccacatgaatttgcagctggcaactagtgagtccaccatgtcccgcaacctcggctgcggagtgctgttccccaagcgtatgccttccttctgtaagagtgcgcctggcaagcacatctgagaagtcgttccgctgcgtcgtgccaacctggcgacaggtgacccagtgtgcgtagacttcttccggattcgtccggctcttctctaggaaacatgcgtgtaaggttcatgtgccaaagccctgcgcgcggtgttcttctactgccctaggaatgtgccgcaggtacccctacttcggtagggatctgagcggtagctaattgtctacgggtagtttcatttccatcttctcttcaggtcgacatc

SEQ ID NO: 23976 - DNA, 566 bp, synthetic construct
  source 1..566: mol_type = other DNA
cagctagacactttcctcccctccctctgggctgctccggcagtccactccctccccccagcgtaacatgccccgctggagtgatgcacctggaagtcgtggacgtgggttagtaacttcggtgaaaacccactataatgacaactggttgacccccacactcaaaggactcgagtctttctcccttaaggctagcccggccacatgaatttgcagctggcaactagtgagtccaccatgtcccgcaacctcggctgcggagtgctgttccccaagcgtatgccttccttctgtaagagtgcgcctggcaagcacatctgagaagtcgttccgctgcgtcgtgccaacctggcgacaggtgacccagtgtgcgtagacttcttccggattcgtccggctcttctctaggaaacatgcgtgtaaggttcatgtgccaaagccctgcgcgcggtgttcttctactgccctaggaatgtgccgcaggtacccctacttcggtagggatctgagcggtagctaattgtctacgggtagtttcatttccatcttctcttcaggtcgacatc

SEQ ID NO: 23977 - DNA, 516 bp, synthetic construct
  source 1..516: mol_type = other DNA
cctccccccagcgtaacatgccccgctggagtgatgcacctggaagtcgtggacgtgggttagtaacttcggtgaaaacccactataatgacaactggttgacccccacactcaaaggactcgagtctttctcccttaaggctagcccggccacatgaatttgcagctggcaactagtgagtccaccatgtcccgcaacctcggctgcggagtgctgttccccaagcgtatgccttccttctgtaagagtgcgcctggcaagcacatctgagaagtcgttccgctgcgtcgtgccaacctggcgacaggtgacccagtgtgcgtagacttcttccggattcgtccggctcttctctaggaaacatgcgtgtaaggttcatgtgccaaagccctgcgcgcggtgttcttctactgccctaggaatgtgccgcaggtacccctacttcggtagggatctgagcggtagctaattgtctacgggtagtttcatttccatcttctcttcaggtcgacatc

SEQ ID NO: 23978 - DNA, 719 bp, synthetic construct
  source 1..719: mol_type = other DNA
tgcctgaagctggcactgtgaggttagtctactaaccaaggcttccgtgcagggcttgcacgttaggagttcatgttgattcatgctccaatgcccaaaactttgtgtgtttgtctgtgtctttcccaaagttcttcctaaggtttcggtactcaagccttaatctctggtcccagcttttgggccttagtatccagagaatgtacccgtgcttcgatgaacgtaagaaagctgtcttttaccgaaaaattttaatgaaataagtataactggctcgcgccacctggtgtgtgccgttggaattcccccatggtaacatggtccaacgggcccgaaaggctagtgggcaatcggtcctccaaggaaggggttcccaccccgacctgaacaggattcgatgaagctcacctcccaggctcctaaccccaaggaagtttacttaaagtaattaagatctagtacgtaattgctggcaattttgctagtagttgggaacgttatgacctaatgagtagacccccagaaggtaccccattttatgggatctgatctgggccctatactgtgtgtctccccacatatagggttaaaacaatgaaagttaggtccaaaatattcttttctttttattctttctttagtggtgacgccattatatcagcaatttgctgatgttttatagcgtacgcggcgatacgaacgattcatcactagagaaa

SEQ ID NO: 23979 - DNA, 669 bp, synthetic construct
  source 1..669: mol_type = other DNA
agggcttgcacgttaggagttcatgttgattcatgctccaatgcccaaaactttgtgtgtttgtctgtgtctttcccaaagttcttcctaaggtttcggtactcaagccttaatctctggtcccagcttttgggccttagtatccagagaatgtacccgtgcttcgatgaacgtaagaaagctgtcttttaccgaaaaattttaatgaaataagtataactggctcgcgccacctggtgtgtgccgttggaattcccccatggtaacatggtccaacgggcccgaaaggctagtgggcaatcggtcctccaaggaaggggttcccaccccgacctgaacaggattcgatgaagctcacctcccaggctcctaaccccaaggaagtttacttaaagtaattaagatctagtacgtaattgctggcaattttgctagtagttgggaacgttatgacctaatgagtagacccccagaaggtaccccattttatgggatctgatctgggccctatactgtgtgtctccccacatatagggttaaaacaatgaaagttaggtccaaaatattcttttctttttattctttctttagtggtgacgccattatatcagcaatttgctgatgttttatagcgtacgcggcgatacgaacgattcatcactagagaaa

SEQ ID NO: 23980 - DNA, 619 bp, synthetic construct
  source 1..619: mol_type = other DNA
ctttgtgtgtttgtctgtgtctttcccaaagttcttcctaaggtttcggtactcaagccttaatctctggtcccagcttttgggccttagtatccagagaatgtacccgtgcttcgatgaacgtaagaaagctgtcttttaccgaaaaattttaatgaaataagtataactggctcgcgccacctggtgtgtgccgttggaattcccccatggtaacatggtccaacgggcccgaaaggctagtgggcaatcggtcctccaaggaaggggttcccaccccgacctgaacaggattcgatgaagctcacctcccaggctcctaaccccaaggaagtttacttaaagtaattaagatctagtacgtaattgctggcaattttgctagtagttgggaacgttatgacctaatgagtagacccccagaaggtaccccattttatgggatctgatctgggccctatactgtgtgtctccccacatatagggttaaaacaatgaaagttaggtccaaaatattcttttctttttattctttctttagtggtgacgccattatatcagcaatttgctgatgttttatagcgtacgcggcgatacgaacgattcatcactagagaaa

SEQ ID NO: 23981 - DNA, 569 bp, synthetic construct
  source 1..569: mol_type = other DNA
actcaagccttaatctctggtcccagcttttgggccttagtatccagagaatgtacccgtgcttcgatgaacgtaagaaagctgtcttttaccgaaaaattttaatgaaataagtataactggctcgcgccacctggtgtgtgccgttggaattcccccatggtaacatggtccaacgggcccgaaaggctagtgggcaatcggtcctccaaggaaggggttcccaccccgacctgaacaggattcgatgaagctcacctcccaggctcctaaccccaaggaagtttacttaaagtaattaagatctagtacgtaattgctggcaattttgctagtagttgggaacgttatgacctaatgagtagacccccagaaggtaccccattttatgggatctgatctgggccctatactgtgtgtctccccacatatagggttaaaacaatgaaagttaggtccaaaatattcttttctttttattctttctttagtggtgacgccattatatcagcaatttgctgatgttttatagcgtacgcggcgatacgaacgattcatcactagagaaa

SEQ ID NO: 23982 - DNA, 519 bp, synthetic construct
  source 1..519: mol_type = other DNA
atgtacccgtgcttcgatgaacgtaagaaagctgtcttttaccgaaaaattttaatgaaataagtataactggctcgcgccacctggtgtgtgccgttggaattcccccatggtaacatggtccaacgggcccgaaaggctagtgggcaatcggtcctccaaggaaggggttcccaccccgacctgaacaggattcgatgaagctcacctcccaggctcctaaccccaaggaagtttacttaaagtaattaagatctagtacgtaattgctggcaattttgctagtagttgggaacgttatgacctaatgagtagacccccagaaggtaccccattttatgggatctgatctgggccctatactgtgtgtctccccacatatagggttaaaacaatgaaagttaggtccaaaatattcttttctttttattctttctttagtggtgacgccattatatcagcaatttgctgatgttttatagcgtacgcggcgatacgaacgattcatcactagagaaa

SEQ ID NO: 23983 - DNA, 720 bp, synthetic construct
  source 1..720: mol_type = other DNA
caaggccaactcggttcaacttcggtttccggacaaatacaagaacctcagtcctcttggtactttctcgcctgagtcaacaaagcgagaaacctgcccctctaacgccagacgagcggcatgaaacttgaacttctggcatgttccactttccctctccctcaccccaccccaccgcgctctcaaggtcgcgctcttccgggactagcccggttttaaaagttcctggcaccctttgcccctctaggcccttaaggtaggaactgaccttgtgctgtgatctcggtgcggaagtgctactgcgtagtgattgtaagatccctttgtggttctgccctggcaaggctacagagtactgtgatccgctgcggacgccatcctggtaacaggacccccagtgtgcgcaacagtatgtccacggtcttccgtgttcaccacattcggaacactgctctcgtgaaacagtgtgtgtccaatccctgtgaccagtattaaccacaccacctaggaatgctaggaaggtaccccggttcgccgggatctgatcctaggctaattgtctacagtggtgctccttttattttcccctcacttcattgactacaactgcttgatttccgtgtttgctgctcttcttagctctcactgccattctcaagtgttcacactgtccaagctcctttggttgtttgcctccacttgccactgtcaactcttgtc

SEQ ID NO: 23984 - DNA, 670 bp, synthetic construct
  source 1..670: mol_type = other DNA
gtcctcttggtactttctcgcctgagtcaacaaagcgagaaacctgcccctctaacgccagacgagcggcatgaaacttgaacttctggcatgttccactttccctctccctcaccccaccccaccgcgctctcaaggtcgcgctcttccgggactagcccggttttaaaagttcctggcaccctttgcccctctaggcccttaaggtaggaactgaccttgtgctgtgatctcggtgcggaagtgctactgcgtagtgattgtaagatccctttgtggttctgccctggcaaggctacagagtactgtgatccgctgcggacgccatcctggtaacaggacccccagtgtgcgcaacagtatgtccacggtcttccgtgttcaccacattcggaacactgctctcgtgaaacagtgtgtgtccaatccctgtgaccagtattaaccacaccacctaggaatgctaggaaggtaccccggttcgccgggatctgatcctaggctaattgtctacagtggtgctccttttattttcccctcacttcattgactacaactgcttgatttccgtgtttgctgctcttcttagctctcactgccattctcaagtgttcacactgtccaagctcctttggttgtttgcctccacttgccactgtcaactcttgtc

SEQ ID NO: 23985 - DNA, 620 bp, synthetic construct
  source 1..620: mol_type = other DNA
tctaacgccagacgagcggcatgaaacttgaacttctggcatgttccactttccctctccctcaccccaccccaccgcgctctcaaggtcgcgctcttccgggactagcccggttttaaaagttcctggcaccctttgcccctctaggcccttaaggtaggaactgaccttgtgctgtgatctcggtgcggaagtgctactgcgtagtgattgtaagatccctttgtggttctgccctggcaaggctacagagtactgtgatccgctgcggacgccatcctggtaacaggacccccagtgtgcgcaacagtatgtccacggtcttccgtgttcaccacattcggaacactgctctcgtgaaacagtgtgtgtccaatccctgtgaccagtattaaccacaccacctaggaatgctaggaaggtaccccggttcgccgggatctgatcctaggctaattgtctacagtggtgctccttttattttcccctcacttcattgactacaactgcttgatttccgtgtttgctgctcttcttagctctcactgccattctcaagtgttcacactgtccaagctcctttggttgtttgcctccacttgccactgtcaactcttgtc

SEQ ID NO: 23986 - DNA, 570 bp, synthetic construct
  source 1..570: mol_type = other DNA
ttccctctccctcaccccaccccaccgcgctctcaaggtcgcgctcttccgggactagcccggttttaaaagttcctggcaccctttgcccctctaggcccttaaggtaggaactgaccttgtgctgtgatctcggtgcggaagtgctactgcgtagtgattgtaagatccctttgtggttctgccctggcaaggctacagagtactgtgatccgctgcggacgccatcctggtaacaggacccccagtgtgcgcaacagtatgtccacggtcttccgtgttcaccacattcggaacactgctctcgtgaaacagtgtgtgtccaatccctgtgaccagtattaaccacaccacctaggaatgctaggaaggtaccccggttcgccgggatctgatcctaggctaattgtctacagtggtgctccttttattttcccctcacttcattgactacaactgcttgatttccgtgtttgctgctcttcttagctctcactgccattctcaagtgttcacactgtccaagctcctttggttgtttgcctccacttgccactgtcaactcttgtc

SEQ ID NO: 23987 - DNA, 520 bp, synthetic construct
  source 1..520: mol_type = other DNA
gggactagcccggttttaaaagttcctggcaccctttgcccctctaggcccttaaggtaggaactgaccttgtgctgtgatctcggtgcggaagtgctactgcgtagtgattgtaagatccctttgtggttctgccctggcaaggctacagagtactgtgatccgctgcggacgccatcctggtaacaggacccccagtgtgcgcaacagtatgtccacggtcttccgtgttcaccacattcggaacactgctctcgtgaaacagtgtgtgtccaatccctgtgaccagtattaaccacaccacctaggaatgctaggaaggtaccccggttcgccgggatctgatcctaggctaattgtctacagtggtgctccttttattttcccctcacttcattgactacaactgcttgatttccgtgtttgctgctcttcttagctctcactgccattctcaagtgttcacactgtccaagctcctttggttgtttgcctccacttgccactgtcaactcttgtc

SEQ ID NO: 23988 - DNA, 723 bp, synthetic construct
  source 1..723: mol_type = other DNA
ccttaaataaattaagatcaccactactgaggggagtagtccgactccgctccggtaccgccgcaccagtattccggtacgcctagtaccctaatacggagtagatggtgtccctcacccgaaacttagaagaaagtaaactacccgaccaataggagcgcggcatccagtcgcgtatcggtcaagcacttctgtttccccggtctgcatagatcgttacccgcccgacccactgcgagaagcctagtagctggccaagcgaatgcgaggttgcgctcaaccacaaccccagtggtagctctggaagatggggctcgcaaactcccccgtggtaacacggttgcttgcccgcgcgtgcttccgggttcggtctcacgccgttcacctcaacctcgcgtaaccagtcaagagcttattgcgctggggcggttctcctccggggccgtgaatgctgctaatcctaacctctgagcgtgtgcgcacaaaccagtgttgctacgtcgtaatgcgcaagttggaggcggaacagactactttcggtaccccgtgtttcctttaattttatatttcaatttatggtgacattgactgacatttgccaagttgctcggttacctctgaacattgctttgtattatctgatagctttctacaaaaccacccagctttcacttgaactcattgagtttgtagtttatttgaaccaagcacacaaattctacg

SEQ ID NO: 23989 - DNA, 673 bp, synthetic construct
  source 1..673: mol_type = other DNA
tccggtaccgccgcaccagtattccggtacgcctagtaccctaatacggagtagatggtgtccctcacccgaaacttagaagaaagtaaactacccgaccaataggagcgcggcatccagtcgcgtatcggtcaagcacttctgtttccccggtctgcatagatcgttacccgcccgacccactgcgagaagcctagtagctggccaagcgaatgcgaggttgcgctcaaccacaaccccagtggtagctctggaagatggggctcgcaaactcccccgtggtaacacggttgcttgcccgcgcgtgcttccgggttcggtctcacgccgttcacctcaacctcgcgtaaccagtcaagagcttattgcgctggggcggttctcctccggggccgtgaatgctgctaatcctaacctctgagcgtgtgcgcacaaaccagtgttgctacgtcgtaatgcgcaagttggaggcggaacagactactttcggtaccccgtgtttcctttaattttatatttcaatttatggtgacattgactgacatttgccaagttgctcggttacctctgaacattgctttgtattatctgatagctttctacaaaaccacccagctttcacttgaactcattgagtttgtagtttatttgaaccaagcacacaaattctacg

SEQ ID NO: 23990 - DNA, 623 bp, synthetic construct
  source 1..623: mol_type = other DNA
gtagatggtgtccctcacccgaaacttagaagaaagtaaactacccgaccaataggagcgcggcatccagtcgcgtatcggtcaagcacttctgtttccccggtctgcatagatcgttacccgcccgacccactgcgagaagcctagtagctggccaagcgaatgcgaggttgcgctcaaccacaaccccagtggtagctctggaagatggggctcgcaaactcccccgtggtaacacggttgcttgcccgcgcgtgcttccgggttcggtctcacgccgttcacctcaacctcgcgtaaccagtcaagagcttattgcgctggggcggttctcctccggggccgtgaatgctgctaatcctaacctctgagcgtgtgcgcacaaaccagtgttgctacgtcgtaatgcgcaagttggaggcggaacagactactttcggtaccccgtgtttcctttaattttatatttcaatttatggtgacattgactgacatttgccaagttgctcggttacctctgaacattgctttgtattatctgatagctttctacaaaaccacccagctttcacttgaactcattgagtttgtagtttatttgaaccaagcacacaaattctacg

SEQ ID NO: 23991 - DNA, 573 bp, synthetic construct
  source 1..573: mol_type = other DNA
aataggagcgcggcatccagtcgcgtatcggtcaagcacttctgtttccccggtctgcatagatcgttacccgcccgacccactgcgagaagcctagtagctggccaagcgaatgcgaggttgcgctcaaccacaaccccagtggtagctctggaagatggggctcgcaaactcccccgtggtaacacggttgcttgcccgcgcgtgcttccgggttcggtctcacgccgttcacctcaacctcgcgtaaccagtcaagagcttattgcgctggggcggttctcctccggggccgtgaatgctgctaatcctaacctctgagcgtgtgcgcacaaaccagtgttgctacgtcgtaatgcgcaagttggaggcggaacagactactttcggtaccccgtgtttcctttaattttatatttcaatttatggtgacattgactgacatttgccaagttgctcggttacctctgaacattgctttgtattatctgatagctttctacaaaaccacccagctttcacttgaactcattgagtttgtagtttatttgaaccaagcacacaaattctacg

SEQ ID NO: 23992 - DNA, 523 bp, synthetic construct
  source 1..523: mol_type = other DNA
cggtctgcatagatcgttacccgcccgacccactgcgagaagcctagtagctggccaagcgaatgcgaggttgcgctcaaccacaaccccagtggtagctctggaagatggggctcgcaaactcccccgtggtaacacggttgcttgcccgcgcgtgcttccgggttcggtctcacgccgttcacctcaacctcgcgtaaccagtcaagagcttattgcgctggggcggttctcctccggggccgtgaatgctgctaatcctaacctctgagcgtgtgcgcacaaaccagtgttgctacgtcgtaatgcgcaagttggaggcggaacagactactttcggtaccccgtgtttcctttaattttatatttcaatttatggtgacattgactgacatttgccaagttgctcggttacctctgaacattgctttgtattatctgatagctttctacaaaaccacccagctttcacttgaactcattgagtttgtagtttatttgaaccaagcacacaaattctacg

SEQ ID NO: 23993 - DNA, 724 bp, synthetic construct
  source 1..724: mol_type = other DNA
ggaataaatcaatattcccagagccgaggggagtagtccgactccgctccactacggtgctccagtagattgctattgcggtagctctctacggggtggctggtattcctcaccctgaaacttagaagtttgtacacaccgaccaatagcggtctggcagccagccaggcaacggtcaagcacttctgtttccccggtccgcaaggatcgttacccgcccgaattgctacgaaaagcctagtaagtacccaagtttgtgcgaggttgcgttcagccacaatcccagtggtagctctgagtgatggggctcgtgattacccctctggtgacagagacacttgcccgcgcgtgcacttgggttcaccagaaatggtgttcacctcaatcaagcgcaagtactgaagagccaattgtgccaatttggtctcctccggggccgtgaatgctgctaatcctaacctccgagcgtgtgcgcacaatccagtgttgctacgtcgtaacgcgtaagttggaggcggaacagactactttcggtaccccgtgtttccttattttattcatttaaatttatggtgacaattgttgagatttgtgagctagcaaaattaccattgaatttggcattgtactgtctcattgcttttcacaaaacctcagatatcccacccagttacattgatcttttagttcatttgaatttacagttcaaactgagacaagtaaa

SEQ ID NO: 23994 - DNA, 674 bp, synthetic construct
  source 1..674: mol_type = other DNA
actacggtgctccagtagattgctattgcggtagctctctacggggtggctggtattcctcaccctgaaacttagaagtttgtacacaccgaccaatagcggtctggcagccagccaggcaacggtcaagcacttctgtttccccggtccgcaaggatcgttacccgcccgaattgctacgaaaagcctagtaagtacccaagtttgtgcgaggttgcgttcagccacaatcccagtggtagctctgagtgatggggctcgtgattacccctctggtgacagagacacttgcccgcgcgtgcacttgggttcaccagaaatggtgttcacctcaatcaagcgcaagtactgaagagccaattgtgccaatttggtctcctccggggccgtgaatgctgctaatcctaacctccgagcgtgtgcgcacaatccagtgttgctacgtcgtaacgcgtaagttggaggcggaacagactactttcggtaccccgtgtttccttattttattcatttaaatttatggtgacaattgttgagatttgtgagctagcaaaattaccattgaatttggcattgtactgtctcattgcttttcacaaaacctcagatatcccacccagttacattgatcttttagttcatttgaatttacagttcaaactgagacaagtaaa

SEQ ID NO: 23995 - DNA, 624 bp, synthetic construct
  source 1..624: mol_type = other DNA
tggtattcctcaccctgaaacttagaagtttgtacacaccgaccaatagcggtctggcagccagccaggcaacggtcaagcacttctgtttccccggtccgcaaggatcgttacccgcccgaattgctacgaaaagcctagtaagtacccaagtttgtgcgaggttgcgttcagccacaatcccagtggtagctctgagtgatggggctcgtgattacccctctggtgacagagacacttgcccgcgcgtgcacttgggttcaccagaaatggtgttcacctcaatcaagcgcaagtactgaagagccaattgtgccaatttggtctcctccggggccgtgaatgctgctaatcctaacctccgagcgtgtgcgcacaatccagtgttgctacgtcgtaacgcgtaagttggaggcggaacagactactttcggtaccccgtgtttccttattttattcatttaaatttatggtgacaattgttgagatttgtgagctagcaaaattaccattgaatttggcattgtactgtctcattgcttttcacaaaacctcagatatcccacccagttacattgatcttttagttcatttgaatttacagttcaaactgagacaagtaaa

SEQ ID NO: 23996 - DNA, 574 bp, synthetic construct
  source 1..574: mol_type = other DNA
ggtctggcagccagccaggcaacggtcaagcacttctgtttccccggtccgcaaggatcgttacccgcccgaattgctacgaaaagcctagtaagtacccaagtttgtgcgaggttgcgttcagccacaatcccagtggtagctctgagtgatggggctcgtgattacccctctggtgacagagacacttgcccgcgcgtgcacttgggttcaccagaaatggtgttcacctcaatcaagcgcaagtactgaagagccaattgtgccaatttggtctcctccggggccgtgaatgctgctaatcctaacctccgagcgtgtgcgcacaatccagtgttgctacgtcgtaacgcgtaagttggaggcggaacagactactttcggtaccccgtgtttccttattttattcatttaaatttatggtgacaattgttgagatttgtgagctagcaaaattaccattgaatttggcattgtactgtctcattgcttttcacaaaacctcagatatcccacccagttacattgatcttttagttcatttgaatttacagttcaaactgagacaagtaaa

SEQ ID NO: 23997 - DNA, 524 bp, synthetic construct
  source 1..524: mol_type = other DNA
gcaaggatcgttacccgcccgaattgctacgaaaagcctagtaagtacccaagtttgtgcgaggttgcgttcagccacaatcccagtggtagctctgagtgatggggctcgtgattacccctctggtgacagagacacttgcccgcgcgtgcacttgggttcaccagaaatggtgttcacctcaatcaagcgcaagtactgaagagccaattgtgccaatttggtctcctccggggccgtgaatgctgctaatcctaacctccgagcgtgtgcgcacaatccagtgttgctacgtcgtaacgcgtaagttggaggcggaacagactactttcggtaccccgtgtttccttattttattcatttaaatttatggtgacaattgttgagatttgtgagctagcaaaattaccattgaatttggcattgtactgtctcattgcttttcacaaaacctcagatatcccacccagttacattgatcttttagttcatttgaatttacagttcaaactgagacaagtaaa

SEQ ID NO: 23998 - DNA, 737 bp, synthetic construct
  source 1..737: mol_type = other DNA
ggcttcgcagtgttcccacccacagggcccactgggcgccagcactctgattccacggaatctttgtgtgcctgttttacaaccctttcctaatttgtaacgtagaagcaatatacactactgatcaatagcaggcatggcgcgccagtcatgtctcgatcaagcacttctgtttccccggactgagtatcaatagactgctcacgcggttgaaggagaaaacgttcgttatccggctaactacttcgagaaacctagtagcaccatagaagctgcagagtgtttcgctcagcacttcccccgtgtagatcaggctgatgagtcactgcaatccccacgggcgaccgtggcagtggctgcgctggcggcctgcctatggggcaacccataggacgctctaatgtggacatggtgcgaagagtctattgagctagttagtagtcctccggcccctgaatgcggctaatcttaactgcggagcacatgccttcaacccaggaggtggtgtgtcgtaacgggcaactctgcagcggaaccgactactttgggtgtccgtgtttctctttatccttatattggctgcttatggtgacaattacggaattgttaccatatagctattggattggccatccggtgtctaatagagctattgtgtacctatttgttggatttactccgctatcatataaatctctgaacactttgtgctttatattgaacttaaacacacgaaa

SEQ ID NO: 23999 - DNA, 687 bp, synthetic construct
  source 1..687: mol_type = other DNA
ttccacggaatctttgtgtgcctgttttacaaccctttcctaatttgtaacgtagaagcaatatacactactgatcaatagcaggcatggcgcgccagtcatgtctcgatcaagcacttctgtttccccggactgagtatcaatagactgctcacgcggttgaaggagaaaacgttcgttatccggctaactacttcgagaaacctagtagcaccatagaagctgcagagtgtttcgctcagcacttcccccgtgtagatcaggctgatgagtcactgcaatccccacgggcgaccgtggcagtggctgcgctggcggcctgcctatggggcaacccataggacgctctaatgtggacatggtgcgaagagtctattgagctagttagtagtcctccggcccctgaatgcggctaatcttaactgcggagcacatgccttcaacccaggaggtggtgtgtcgtaacgggcaactctgcagcggaaccgactactttgggtgtccgtgtttctctttatccttatattggctgcttatggtgacaattacggaattgttaccatatagctattggattggccatccggtgtctaatagagctattgtgtacctatttgttggatttactccgctatcatataaatctctgaacactttgtgctttatattgaacttaaacacacgaaa

SEQ ID NO: 24000 - DNA, 637 bp, synthetic construct
  source 1..637: mol_type = other DNA
cgtagaagcaatatacactactgatcaatagcaggcatggcgcgccagtcatgtctcgatcaagcacttctgtttccccggactgagtatcaatagactgctcacgcggttgaaggagaaaacgttcgttatccggctaactacttcgagaaacctagtagcaccatagaagctgcagagtgtttcgctcagcacttcccccgtgtagatcaggctgatgagtcactgcaatccccacgggcgaccgtggcagtggctgcgctggcggcctgcctatggggcaacccataggacgctctaatgtggacatggtgcgaagagtctattgagctagttagtagtcctccggcccctgaatgcggctaatcttaactgcggagcacatgccttcaacccaggaggtggtgtgtcgtaacgggcaactctgcagcggaaccgactactttgggtgtccgtgtttctctttatccttatattggctgcttatggtgacaattacggaattgttaccatatagctattggattggccatccggtgtctaatagagctattgtgtacctatttgttggatttactccgctatcatataaatctctgaacactttgtgctttatattgaacttaaacacacgaaa

SEQ ID NO: 24001 - DNA, 587 bp, synthetic construct
  source 1..587: mol_type = other DNA
atgtctcgatcaagcacttctgtttccccggactgagtatcaatagactgctcacgcggttgaaggagaaaacgttcgttatccggctaactacttcgagaaacctagtagcaccatagaagctgcagagtgtttcgctcagcacttcccccgtgtagatcaggctgatgagtcactgcaatccccacgggcgaccgtggcagtggctgcgctggcggcctgcctatggggcaacccataggacgctctaatgtggacatggtgcgaagagtctattgagctagttagtagtcctccggcccctgaatgcggctaatcttaactgcggagcacatgccttcaacccaggaggtggtgtgtcgtaacgggcaactctgcagcggaaccgactactttgggtgtccgtgtttctctttatccttatattggctgcttatggtgacaattacggaattgttaccatatagctattggattggccatccggtgtctaatagagctattgtgtacctatttgttggatttactccgctatcatataaatctctgaacactttgtgctttatattgaacttaaacacacgaaa

SEQ ID NO: 24002 - DNA, 537 bp, synthetic construct
  source 1..537: mol_type = other DNA
ctcacgcggttgaaggagaaaacgttcgttatccggctaactacttcgagaaacctagtagcaccatagaagctgcagagtgtttcgctcagcacttcccccgtgtagatcaggctgatgagtcactgcaatccccacgggcgaccgtggcagtggctgcgctggcggcctgcctatggggcaacccataggacgctctaatgtggacatggtgcgaagagtctattgagctagttagtagtcctccggcccctgaatgcggctaatcttaactgcggagcacatgccttcaacccaggaggtggtgtgtcgtaacgggcaactctgcagcggaaccgactactttgggtgtccgtgtttctctttatccttatattggctgcttatggtgacaattacggaattgttaccatatagctattggattggccatccggtgtctaatagagctattgtgtacctatttgttggatttactccgctatcatataaatctctgaacactttgtgctttatattgaacttaaacacacgaaa

SEQ ID NO: 24003 - DNA, 748 bp, synthetic construct
  source 1..748: mol_type = other DNA
gtaccttggtattacggtaccattgtacgccagtacctttgtacgcctgttttatattccctacccccacatgtaactttagaagtttaagtaacaaagaccaataggagtccaacatccagttggattgcggtcaagcacttctgtttccccggacctagtagtgataggctgtacccacggccgaagatgaacccgtccgttatccggccagctacttcgagaagcctagtagcatcaaagatctgtcttggcgtttcgctcagcgcgttccccccgcgtagatcgggctgatgggtctccgcattccccacgggcgaccgtggcggaggccgcgtggcggcccgcctatggcgaaagccataggacgccatttcagtgacagggtgtgaagagcctattgagctagttggtagtcctccggcccctgaatgcggctaatcctaaccactgagcgtccaccagcaaaccagctgggagggcgtcgtaacgggtaactcggtggcggaaccgactactttgggtgtccgtgtttccttttgatcctattgtggctgcttatggtgacaacttacagttgttatcataaagcttttggattggccatccggaaaaagttatcagtgtttgatattgttcggctttcacgcctaccaataagacaatcactttacttgttagttgcattttatcccactaaggatatcactgagttacatcttcaattgctcctaacattatcagcaca

SEQ ID NO: 24004 - DNA, 698 bp, synthetic construct
  source 1..698: mol_type = other DNA
tttatattccctacccccacatgtaactttagaagtttaagtaacaaagaccaataggagtccaacatccagttggattgcggtcaagcacttctgtttccccggacctagtagtgataggctgtacccacggccgaagatgaacccgtccgttatccggccagctacttcgagaagcctagtagcatcaaagatctgtcttggcgtttcgctcagcgcgttccccccgcgtagatcgggctgatgggtctccgcattccccacgggcgaccgtggcggaggccgcgtggcggcccgcctatggcgaaagccataggacgccatttcagtgacagggtgtgaagagcctattgagctagttggtagtcctccggcccctgaatgcggctaatcctaaccactgagcgtccaccagcaaaccagctgggagggcgtcgtaacgggtaactcggtggcggaaccgactactttgggtgtccgtgtttccttttgatcctattgtggctgcttatggtgacaacttacagttgttatcataaagcttttggattggccatccggaaaaagttatcagtgtttgatattgttcggctttcacgcctaccaataagacaatcactttacttgttagttgcattttatcccactaaggatatcactgagttacatcttcaattgctcctaacattatcagcaca

SEQ ID NO: 24005 - DNA, 648 bp, synthetic construct
  source 1..648: mol_type = other DNA
ccaataggagtccaacatccagttggattgcggtcaagcacttctgtttccccggacctagtagtgataggctgtacccacggccgaagatgaacccgtccgttatccggccagctacttcgagaagcctagtagcatcaaagatctgtcttggcgtttcgctcagcgcgttccccccgcgtagatcgggctgatgggtctccgcattccccacgggcgaccgtggcggaggccgcgtggcggcccgcctatggcgaaagccataggacgccatttcagtgacagggtgtgaagagcctattgagctagttggtagtcctccggcccctgaatgcggctaatcctaaccactgagcgtccaccagcaaaccagctgggagggcgtcgtaacgggtaactcggtggcggaaccgactactttgggtgtccgtgtttccttttgatcctattgtggctgcttatggtgacaacttacagttgttatcataaagcttttggattggccatccggaaaaagttatcagtgtttgatattgttcggctttcacgcctaccaataagacaatcactttacttgttagttgcattttatcccactaaggatatcactgagttacatcttcaattgctcctaacattatcagcaca

SEQ ID NO: 24006 - DNA, 598 bp, synthetic construct
  source 1..598: mol_type = other DNA
cccggacctagtagtgataggctgtacccacggccgaagatgaacccgtccgttatccggccagctacttcgagaagcctagtagcatcaaagatctgtcttggcgtttcgctcagcgcgttccccccgcgtagatcgggctgatgggtctccgcattccccacgggcgaccgtggcggaggccgcgtggcggcccgcctatggcgaaagccataggacgccatttcagtgacagggtgtgaagagcctattgagctagttggtagtcctccggcccctgaatgcggctaatcctaaccactgagcgtccaccagcaaaccagctgggagggcgtcgtaacgggtaactcggtggcggaaccgactactttgggtgtccgtgtttccttttgatcctattgtggctgcttatggtgacaacttacagttgttatcataaagcttttggattggccatccggaaaaagttatcagtgtttgatattgttcggctttcacgcctaccaataagacaatcactttacttgttagttgcattttatcccactaaggatatcactgagttacatcttcaattgctcctaacattatcagcaca

SEQ ID NO: 24007 - DNA, 548 bp, synthetic construct
  source 1..548: mol_type = other DNA
cgttatccggccagctacttcgagaagcctagtagcatcaaagatctgtcttggcgtttcgctcagcgcgttccccccgcgtagatcgggctgatgggtctccgcattccccacgggcgaccgtggcggaggccgcgtggcggcccgcctatggcgaaagccataggacgccatttcagtgacagggtgtgaagagcctattgagctagttggtagtcctccggcccctgaatgcggctaatcctaaccactgagcgtccaccagcaaaccagctgggagggcgtcgtaacgggtaactcggtggcggaaccgactactttgggtgtccgtgtttccttttgatcctattgtggctgcttatggtgacaacttacagttgttatcataaagcttttggattggccatccggaaaaagttatcagtgtttgatattgttcggctttcacgcctaccaataagacaatcactttacttgttagttgcattttatcccactaaggatatcactgagttacatcttcaattgctcctaacattatcagcaca

SEQ ID NO: 24008 - DNA, 748 bp, synthetic construct
  source 1..748: mol_type = other DNA
agtaccttggtattacggtaccattgtacgtcagtacctttgtacgcctgttttatatcccttcccccacatgtaacattagaagtcaagtaaacaaagaccaataggagcccaacaaccagttgggttgcggtcaagcacttctgtctccccggacctagtagtgataggctgtacccacggccgaagatgaacccgtccgttatccggccagctacttcgagaagcctagtaacatcaaagatctgtcttggcgtttcgctcagcgcgttccccccgcgtagatcgggctgatgggtctccgcataccccacgggcgaccgtggcggaggccgcgtggcggcccgcctatggcgaaagccataggacgccatttcagtgacagggtgtgaagagcctattgagctagttggtagtcctccggcccctgaatgcggctaatcctaaccacggagcatccaccagcaaaccagctgggagggtgtcgtaacgggtaactctgtggcggaaccgactactttgggtgtccgtgtttccttttgatcctattttggctgcttatggtgacaacgataagttgttatcataaagcttttgggttggccacctggaaaaaattgtcagtgtttgatatcgctcggctttcacgcctaccagtcaaacaagctctttatctccttgttggattctactcaataaaggacataactcagtttcacataaatctgttgctttcattgtcagcaaa

SEQ ID NO: 24009 - DNA, 698 bp, synthetic construct
  source 1..698: mol_type = other DNA
ttttatatcccttcccccacatgtaacattagaagtcaagtaaacaaagaccaataggagcccaacaaccagttgggttgcggtcaagcacttctgtctccccggacctagtagtgataggctgtacccacggccgaagatgaacccgtccgttatccggccagctacttcgagaagcctagtaacatcaaagatctgtcttggcgtttcgctcagcgcgttccccccgcgtagatcgggctgatgggtctccgcataccccacgggcgaccgtggcggaggccgcgtggcggcccgcctatggcgaaagccataggacgccatttcagtgacagggtgtgaagagcctattgagctagttggtagtcctccggcccctgaatgcggctaatcctaaccacggagcatccaccagcaaaccagctgggagggtgtcgtaacgggtaactctgtggcggaaccgactactttgggtgtccgtgtttccttttgatcctattttggctgcttatggtgacaacgataagttgttatcataaagcttttgggttggccacctggaaaaaattgtcagtgtttgatatcgctcggctttcacgcctaccagtcaaacaagctctttatctccttgttggattctactcaataaaggacataactcagtttcacataaatctgttgctttcattgtcagcaaa

SEQ ID NO: 24010 - DNA, 648 bp, synthetic construct
  source 1..648: mol_type = other DNA
ccaataggagcccaacaaccagttgggttgcggtcaagcacttctgtctccccggacctagtagtgataggctgtacccacggccgaagatgaacccgtccgttatccggccagctacttcgagaagcctagtaacatcaaagatctgtcttggcgtttcgctcagcgcgttccccccgcgtagatcgggctgatgggtctccgcataccccacgggcgaccgtggcggaggccgcgtggcggcccgcctatggcgaaagccataggacgccatttcagtgacagggtgtgaagagcctattgagctagttggtagtcctccggcccctgaatgcggctaatcctaaccacggagcatccaccagcaaaccagctgggagggtgtcgtaacgggtaactctgtggcggaaccgactactttgggtgtccgtgtttccttttgatcctattttggctgcttatggtgacaacgataagttgttatcataaagcttttgggttggccacctggaaaaaattgtcagtgtttgatatcgctcggctttcacgcctaccagtcaaacaagctctttatctccttgttggattctactcaataaaggacataactcagtttcacataaatctgttgctttcattgtcagcaaa

SEQ ID NO: 24011 - DNA, 598 bp, synthetic construct
  source 1..598: mol_type = other DNA
cccggacctagtagtgataggctgtacccacggccgaagatgaacccgtccgttatccggccagctacttcgagaagcctagtaacatcaaagatctgtcttggcgtttcgctcagcgcgttccccccgcgtagatcgggctgatgggtctccgcataccccacgggcgaccgtggcggaggccgcgtggcggcccgcctatggcgaaagccataggacgccatttcagtgacagggtgtgaagagcctattgagctagttggtagtcctccggcccctgaatgcggctaatcctaaccacggagcatccaccagcaaaccagctgggagggtgtcgtaacgggtaactctgtggcggaaccgactactttgggtgtccgtgtttccttttgatcctattttggctgcttatggtgacaacgataagttgttatcataaagcttttgggttggccacctggaaaaaattgtcagtgtttgatatcgctcggctttcacgcctaccagtcaaacaagctctttatctccttgttggattctactcaataaaggacataactcagtttcacataaatctgttgctttcattgtcagcaaa

SEQ ID NO: 24012 - DNA, 548 bp, synthetic construct
  source 1..548: mol_type = other DNA
cgttatccggccagctacttcgagaagcctagtaacatcaaagatctgtcttggcgtttcgctcagcgcgttccccccgcgtagatcgggctgatgggtctccgcataccccacgggcgaccgtggcggaggccgcgtggcggcccgcctatggcgaaagccataggacgccatttcagtgacagggtgtgaagagcctattgagctagttggtagtcctccggcccctgaatgcggctaatcctaaccacggagcatccaccagcaaaccagctgggagggtgtcgtaacgggtaactctgtggcggaaccgactactttgggtgtccgtgtttccttttgatcctattttggctgcttatggtgacaacgataagttgttatcataaagcttttgggttggccacctggaaaaaattgtcagtgtttgatatcgctcggctttcacgcctaccagtcaaacaagctctttatctccttgttggattctactcaataaaggacataactcagtttcacataaatctgttgctttcattgtcagcaaa

SEQ ID NO: 24013 - DNA, 750 bp, synthetic construct
  source 1..750: mol_type = other DNA
tagtacctttgtacgcctgttttccccccccttaaacaaattaagatcgctggtcctgtggggagtagtccgactccgcaccgatacgtcgcaccagcactccggtacgcctagtaccctagtgcggaggtaccagtgtccccccccctcgaaacttagaagcaatgaaccaaaccgacccaaaaggatgcgttgcacccagcagcgtaatggtcaagcacttctgtttccccggccgcaaggtcgttatccgcccgcaccactacgagaagcctattaggcagccaagcttgcaaagcgttgcgttcagccacaaccccagtggtagctctgagagatgggactcgttgttcccccatggtaacatggtgacttgtccgcgtgtgctctcgggttcgccatcaggcgttcacgctgcacaagtgtaactgctgaagagcctattgtgctggagcggttttcctccggaaccgtgaatgctgctaatcctaacctctgagcgtgtgcgcacaaaccagtgttgctacgtcgtaacgcgtaagtcggaggcggaacagactactttcggtactccgtgtttccttattttatatcgtttcatttatggtaacaattactgagattttaaagattgccaagctgcccttaaacattggtttgtattatctagttgcattttataaaacctctgagctttcacttgaattgattgatttcttagtctttctaaacaagcataaattgaggaca

SEQ ID NO: 24014 - DNA, 700 bp, synthetic construct
  source 1..700: mol_type = other DNA
tggtcctgtggggagtagtccgactccgcaccgatacgtcgcaccagcactccggtacgcctagtaccctagtgcggaggtaccagtgtccccccccctcgaaacttagaagcaatgaaccaaaccgacccaaaaggatgcgttgcacccagcagcgtaatggtcaagcacttctgtttccccggccgcaaggtcgttatccgcccgcaccactacgagaagcctattaggcagccaagcttgcaaagcgttgcgttcagccacaaccccagtggtagctctgagagatgggactcgttgttcccccatggtaacatggtgacttgtccgcgtgtgctctcgggttcgccatcaggcgttcacgctgcacaagtgtaactgctgaagagcctattgtgctggagcggttttcctccggaaccgtgaatgctgctaatcctaacctctgagcgtgtgcgcacaaaccagtgttgctacgtcgtaacgcgtaagtcggaggcggaacagactactttcggtactccgtgtttccttattttatatcgtttcatttatggtaacaattactgagattttaaagattgccaagctgcccttaaacattggtttgtattatctagttgcattttataaaacctctgagctttcacttgaattgattgatttcttagtctttctaaacaagcataaattgaggaca

SEQ ID NO: 24015 - DNA, 650 bp, synthetic construct
  source 1..650: mol_type = other DNA
tccggtacgcctagtaccctagtgcggaggtaccagtgtccccccccctcgaaacttagaagcaatgaaccaaaccgacccaaaaggatgcgttgcacccagcagcgtaatggtcaagcacttctgtttccccggccgcaaggtcgttatccgcccgcaccactacgagaagcctattaggcagccaagcttgcaaagcgttgcgttcagccacaaccccagtggtagctctgagagatgggactcgttgttcccccatggtaacatggtgacttgtccgcgtgtgctctcgggttcgccatcaggcgttcacgctgcacaagtgtaactgctgaagagcctattgtgctggagcggttttcctccggaaccgtgaatgctgctaatcctaacctctgagcgtgtgcgcacaaaccagtgttgctacgtcgtaacgcgtaagtcggaggcggaacagactactttcggtactccgtgtttccttattttatatcgtttcatttatggtaacaattactgagattttaaagattgccaagctgcccttaaacattggtttgtattatctagttgcattttataaaacctctgagctttcacttgaattgattgatttcttagtctttctaaacaagcataaattgaggaca

SEQ ID NO: 24016 - DNA, 600 bp, synthetic construct
  source 1..600: mol_type = other DNA
gaaacttagaagcaatgaaccaaaccgacccaaaaggatgcgttgcacccagcagcgtaatggtcaagcacttctgtttccccggccgcaaggtcgttatccgcccgcaccactacgagaagcctattaggcagccaagcttgcaaagcgttgcgttcagccacaaccccagtggtagctctgagagatgggactcgttgttcccccatggtaacatggtgacttgtccgcgtgtgctctcgggttcgccatcaggcgttcacgctgcacaagtgtaactgctgaagagcctattgtgctggagcggttttcctccggaaccgtgaatgctgctaatcctaacctctgagcgtgtgcgcacaaaccagtgttgctacgtcgtaacgcgtaagtcggaggcggaacagactactttcggtactccgtgtttccttattttatatcgtttcatttatggtaacaattactgagattttaaagattgccaagctgcccttaaacattggtttgtattatctagttgcattttataaaacctctgagctttcacttgaattgattgatttcttagtctttctaaacaagcataaattgaggaca

SEQ ID NO: 24017 - DNA, 550 bp, synthetic construct
  source 1..550: mol_type = other DNA
agcagcgtaatggtcaagcacttctgtttccccggccgcaaggtcgttatccgcccgcaccactacgagaagcctattaggcagccaagcttgcaaagcgttgcgttcagccacaaccccagtggtagctctgagagatgggactcgttgttcccccatggtaacatggtgacttgtccgcgtgtgctctcgggttcgccatcaggcgttcacgctgcacaagtgtaactgctgaagagcctattgtgctggagcggttttcctccggaaccgtgaatgctgctaatcctaacctctgagcgtgtgcgcacaaaccagtgttgctacgtcgtaacgcgtaagtcggaggcggaacagactactttcggtactccgtgtttccttattttatatcgtttcatttatggtaacaattactgagattttaaagattgccaagctgcccttaaacattggtttgtattatctagttgcattttataaaacctctgagctttcacttgaattgattgatttcttagtctttctaaacaagcataaattgaggaca

SEQ ID NO: 24018 - DNA, 500 bp, synthetic construct
  source 1..500: mol_type = other DNA
ccgcccgcaccactacgagaagcctattaggcagccaagcttgcaaagcgttgcgttcagccacaaccccagtggtagctctgagagatgggactcgttgttcccccatggtaacatggtgacttgtccgcgtgtgctctcgggttcgccatcaggcgttcacgctgcacaagtgtaactgctgaagagcctattgtgctggagcggttttcctccggaaccgtgaatgctgctaatcctaacctctgagcgtgtgcgcacaaaccagtgttgctacgtcgtaacgcgtaagtcggaggcggaacagactactttcggtactccgtgtttccttattttatatcgtttcatttatggtaacaattactgagattttaaagattgccaagctgcccttaaacattggtttgtattatctagttgcattttataaaacctctgagctttcacttgaattgattgatttcttagtctttctaaacaagcataaattgaggaca

SEQ ID NO: 24019 - DNA, 751 bp, synthetic construct
  source 1..751: mol_type = other DNA
acgccagtaccatggtattacggtaccatgttacgtcagtacctttgtacgcctgttttatatcccctccccgaagtaaccttagaagtttaagtaacaaagaccaataggagtccagcaaccagctggattgcggtcaagcacttctgtttccccggacctagtagtgataggctgtacccacggccgaagatgaacccgtccgttatccggccagctacttcgagaagcctagtagcatcaaagatctgtcttggcgtttcgctcagcgcgtttcccccgcgtagatcgggctgatgggtctccgcataccccacgggcgaccgtggcggaggccgcgtggcggcccgcctatggcgaaagccataggacgccatttcagtgacagggtgtgaagagcctattgagctagttggtagtcctccggcccctgaatgcggctaatcctaaccacggagcgtccaccagcaaaccagctggcggggcgtcgtaacgggtaactctgtggcggaaccgactactttgggtgtccgtgtttccttttgatcctattttggctgcttatggtgacaacaataagttgttatcataaagcttttgggttggccacctggaaaaagttatcagtgtttgatattgttcggctttcacgcctaccaacaaaacaagccttatatttattggttgccttttgtcccttggcggaaattactgattttcacctaaagcttctgattacattgacggcaaa

SEQ ID NO: 24020 - DNA, 701 bp, synthetic construct
  source 1..701: mol_type = other DNA
gcctgttttatatcccctccccgaagtaaccttagaagtttaagtaacaaagaccaataggagtccagcaaccagctggattgcggtcaagcacttctgtttccccggacctagtagtgataggctgtacccacggccgaagatgaacccgtccgttatccggccagctacttcgagaagcctagtagcatcaaagatctgtcttggcgtttcgctcagcgcgtttcccccgcgtagatcgggctgatgggtctccgcataccccacgggcgaccgtggcggaggccgcgtggcggcccgcctatggcgaaagccataggacgccatttcagtgacagggtgtgaagagcctattgagctagttggtagtcctccggcccctgaatgcggctaatcctaaccacggagcgtccaccagcaaaccagctggcggggcgtcgtaacgggtaactctgtggcggaaccgactactttgggtgtccgtgtttccttttgatcctattttggctgcttatggtgacaacaataagttgttatcataaagcttttgggttggccacctggaaaaagttatcagtgtttgatattgttcggctttcacgcctaccaacaaaacaagccttatatttattggttgccttttgtcccttggcggaaattactgattttcacctaaagcttctgattacattgacggcaaa

SEQ ID NO: 24021 - DNA, 651 bp, synthetic construct
  source 1..651: mol_type = other DNA
agaccaataggagtccagcaaccagctggattgcggtcaagcacttctgtttccccggacctagtagtgataggctgtacccacggccgaagatgaacccgtccgttatccggccagctacttcgagaagcctagtagcatcaaagatctgtcttggcgtttcgctcagcgcgtttcccccgcgtagatcgggctgatgggtctccgcataccccacgggcgaccgtggcggaggccgcgtggcggcccgcctatggcgaaagccataggacgccatttcagtgacagggtgtgaagagcctattgagctagttggtagtcctccggcccctgaatgcggctaatcctaaccacggagcgtccaccagcaaaccagctggcggggcgtcgtaacgggtaactctgtggcggaaccgactactttgggtgtccgtgtttccttttgatcctattttggctgcttatggtgacaacaataagttgttatcataaagcttttgggttggccacctggaaaaagttatcagtgtttgatattgttcggctttcacgcctaccaacaaaacaagccttatatttattggttgccttttgtcccttggcggaaattactgattttcacctaaagcttctgattacattgacggcaaa

SEQ ID NO: 24022 - DNA, 601 bp, synthetic construct
  source 1..601: mol_type = other DNA
ttccccggacctagtagtgataggctgtacccacggccgaagatgaacccgtccgttatccggccagctacttcgagaagcctagtagcatcaaagatctgtcttggcgtttcgctcagcgcgtttcccccgcgtagatcgggctgatgggtctccgcataccccacgggcgaccgtggcggaggccgcgtggcggcccgcctatggcgaaagccataggacgccatttcagtgacagggtgtgaagagcctattgagctagttggtagtcctccggcccctgaatgcggctaatcctaaccacggagcgtccaccagcaaaccagctggcggggcgtcgtaacgggtaactctgtggcggaaccgactactttgggtgtccgtgtttccttttgatcctattttggctgcttatggtgacaacaataagttgttatcataaagcttttgggttggccacctggaaaaagttatcagtgtttgatattgttcggctttcacgcctaccaacaaaacaagccttatatttattggttgccttttgtcccttggcggaaattactgattttcacctaaagcttctgattacattgacggcaaa

SEQ ID NO: 24023 - DNA, 551 bp, synthetic construct
  source 1..551: mol_type = other DNA
gtccgttatccggccagctacttcgagaagcctagtagcatcaaagatctgtcttggcgtttcgctcagcgcgtttcccccgcgtagatcgggctgatgggtctccgcataccccacgggcgaccgtggcggaggccgcgtggcggcccgcctatggcgaaagccataggacgccatttcagtgacagggtgtgaagagcctattgagctagttggtagtcctccggcccctgaatgcggctaatcctaaccacggagcgtccaccagcaaaccagctggcggggcgtcgtaacgggtaactctgtggcggaaccgactactttgggtgtccgtgtttccttttgatcctattttggctgcttatggtgacaacaataagttgttatcataaagcttttgggttggccacctggaaaaagttatcagtgtttgatattgttcggctttcacgcctaccaacaaaacaagccttatatttattggttgccttttgtcccttggcggaaattactgattttcacctaaagcttctgattacattgacggcaaa

SEQ ID NO: 24024 - DNA, 501 bp, synthetic construct
  source 1..501: mol_type = other DNA
gtcttggcgtttcgctcagcgcgtttcccccgcgtagatcgggctgatgggtctccgcataccccacgggcgaccgtggcggaggccgcgtggcggcccgcctatggcgaaagccataggacgccatttcagtgacagggtgtgaagagcctattgagctagttggtagtcctccggcccctgaatgcggctaatcctaaccacggagcgtccaccagcaaaccagctggcggggcgtcgtaacgggtaactctgtggcggaaccgactactttgggtgtccgtgtttccttttgatcctattttggctgcttatggtgacaacaataagttgttatcataaagcttttgggttggccacctggaaaaagttatcagtgtttgatattgttcggctttcacgcctaccaacaaaacaagccttatatttattggttgccttttgtcccttggcggaaattactgattttcacctaaagcttctgattacattgacggcaaa

SEQ ID NO: 24025 - DNA, 753 bp, synthetic construct
  source 1..753: mol_type = other DNA
ggcgcgcctcggcaaggccgccgataccgcactgtgctacttcggtaccactctgcgggaatgacaatatgcccggtgtatagtttgcctgtttctcgcaccgttaccgctcgttcgggaatgtgaaactggcacccctcctctcccctaccaccctttctccttcgcccccattcataatttacaacgccgcacacagcggcggccgccaagggctagcctggcggttataaaaggaacctgggtctttccctcttcaagccaaaaggtaggttccctgtgtccctgaatgctcggtgaggaatgctgcaccgtaacgctttgtgaagtgtttgcaagttctggcccggcaagcctacagagtgctgtgatccgctgcggacgccatcctggtaacaggacccccagtgtgcgcaacagtatgttcagacttcggtttgttcacttgctttcatggaccattgcgcgaaagtgcgtgcgccatatccctgtacttcaggtgtgcttctctggaccctaggaatgctgcgaaggtaccccgtttcggcgggatctgatcgcaggctaattgtctatgggttcagtttcctttttctttactccacaattgactgcttaactgactctggatcttgtgcttccactgctctttctgctctcaaaacggcttcacttaccaactctcacctttcgaccaacaccatttacacactaacttttttcgactcttctgactcctggcttggtgaagac

SEQ ID NO: 24026 - DNA, 703 bp, synthetic construct
  source 1..703: mol_type = other DNA
ctctgcgggaatgacaatatgcccggtgtatagtttgcctgtttctcgcaccgttaccgctcgttcgggaatgtgaaactggcacccctcctctcccctaccaccctttctccttcgcccccattcataatttacaacgccgcacacagcggcggccgccaagggctagcctggcggttataaaaggaacctgggtctttccctcttcaagccaaaaggtaggttccctgtgtccctgaatgctcggtgaggaatgctgcaccgtaacgctttgtgaagtgtttgcaagttctggcccggcaagcctacagagtgctgtgatccgctgcggacgccatcctggtaacaggacccccagtgtgcgcaacagtatgttcagacttcggtttgttcacttgctttcatggaccattgcgcgaaagtgcgtgcgccatatccctgtacttcaggtgtgcttctctggaccctaggaatgctgcgaaggtaccccgtttcggcgggatctgatcgcaggctaattgtctatgggttcagtttcctttttctttactccacaattgactgcttaactgactctggatcttgtgcttccactgctctttctgctctcaaaacggcttcacttaccaactctcacctttcgaccaacaccatttacacactaacttttttcgactcttctgactcctggcttggtgaagac

SEQ ID NO: 24027 - DNA, 653 bp, synthetic construct
  source 1..653: mol_type = other DNA
ccgttaccgctcgttcgggaatgtgaaactggcacccctcctctcccctaccaccctttctccttcgcccccattcataatttacaacgccgcacacagcggcggccgccaagggctagcctggcggttataaaaggaacctgggtctttccctcttcaagccaaaaggtaggttccctgtgtccctgaatgctcggtgaggaatgctgcaccgtaacgctttgtgaagtgtttgcaagttctggcccggcaagcctacagagtgctgtgatccgctgcggacgccatcctggtaacaggacccccagtgtgcgcaacagtatgttcagacttcggtttgttcacttgctttcatggaccattgcgcgaaagtgcgtgcgccatatccctgtacttcaggtgtgcttctctggaccctaggaatgctgcgaaggtaccccgtttcggcgggatctgatcgcaggctaattgtctatgggttcagtttcctttttctttactccacaattgactgcttaactgactctggatcttgtgcttccactgctctttctgctctcaaaacggcttcacttaccaactctcacctttcgaccaacaccatttacacactaacttttttcgactcttctgactcctggcttggtgaagac

SEQ ID NO: 24028 - DNA, 603 bp, synthetic construct
  source 1..603: mol_type = other DNA
ccaccctttctccttcgcccccattcataatttacaacgccgcacacagcggcggccgccaagggctagcctggcggttataaaaggaacctgggtctttccctcttcaagccaaaaggtaggttccctgtgtccctgaatgctcggtgaggaatgctgcaccgtaacgctttgtgaagtgtttgcaagttctggcccggcaagcctacagagtgctgtgatccgctgcggacgccatcctggtaacaggacccccagtgtgcgcaacagtatgttcagacttcggtttgttcacttgctttcatggaccattgcgcgaaagtgcgtgcgccatatccctgtacttcaggtgtgcttctctggaccctaggaatgctgcgaaggtaccccgtttcggcgggatctgatcgcaggctaattgtctatgggttcagtttcctttttctttactccacaattgactgcttaactgactctggatcttgtgcttccactgctctttctgctctcaaaacggcttcacttaccaactctcacctttcgaccaacaccatttacacactaacttttttcgactcttctgactcctggcttggtgaagac

SEQ ID NO: 24029 - DNA, 553 bp, synthetic construct
  source 1..553: mol_type = other DNA
ggcggccgccaagggctagcctggcggttataaaaggaacctgggtctttccctcttcaagccaaaaggtaggttccctgtgtccctgaatgctcggtgaggaatgctgcaccgtaacgctttgtgaagtgtttgcaagttctggcccggcaagcctacagagtgctgtgatccgctgcggacgccatcctggtaacaggacccccagtgtgcgcaacagtatgttcagacttcggtttgttcacttgctttcatggaccattgcgcgaaagtgcgtgcgccatatccctgtacttcaggtgtgcttctctggaccctaggaatgctgcgaaggtaccccgtttcggcgggatctgatcgcaggctaattgtctatgggttcagtttcctttttctttactccacaattgactgcttaactgactctggatcttgtgcttccactgctctttctgctctcaaaacggcttcacttaccaactctcacctttcgaccaacaccatttacacactaacttttttcgactcttctgactcctggcttggtgaagac

SEQ ID NO: 24030 - DNA, 503 bp, synthetic construct
  source 1..503: mol_type = other DNA
ccctcttcaagccaaaaggtaggttccctgtgtccctgaatgctcggtgaggaatgctgcaccgtaacgctttgtgaagtgtttgcaagttctggcccggcaagcctacagagtgctgtgatccgctgcggacgccatcctggtaacaggacccccagtgtgcgcaacagtatgttcagacttcggtttgttcacttgctttcatggaccattgcgcgaaagtgcgtgcgccatatccctgtacttcaggtgtgcttctctggaccctaggaatgctgcgaaggtaccccgtttcggcgggatctgatcgcaggctaattgtctatgggttcagtttcctttttctttactccacaattgactgcttaactgactctggatcttgtgcttccactgctctttctgctctcaaaacggcttcacttaccaactctcacctttcgaccaacaccatttacacactaacttttttcgactcttctgactcctggcttggtgaagac

SEQ ID NO: 24031 - DNA, 754 bp, synthetic construct
  source 1..754: mol_type = other DNA
tgcctaacctcggtattacggtaccgttgtttacagtacctttgtacgcctgttttatatcccctccccacaagcaactttagaagtatcaagcaaataaggaccaataggagtccaacacccagttggatcatggtcaagcacttctgtctccccggacctagtagtgataggctgtacccacggccgaagatgaaaccgtccgttatccggccagctacttcgagaagcctagtagcatcaaagatctgtcttggcgtttcgctcagcgcgttttcccccgcgtagatcgggctgatgggtctccgcataccccacgggcgaccgtggcggaggccgcgtggcggcccgcctatggcgaaagccataggacgccatttcagtgacagggtgtgaagagcctattgagctagttggtagtcctccggcccctgaatgcggctaatcctaaccacggagcgtttaccagcaaaccagctggcggaacgtcgtaacgggtaactctgtggcggaaccgactactttgggtgtccgtgtttccttttgatcctattgtggctgcttatggtgacaacttacggttgttatcataaagcttttggattggccatccggaaagagttatcagtgtttgatattgttcggctttcacgcctaccattaagacaatcactttatttgttagttgcattttatcctgccaaggacattactgagtttcacctacaactttactcatacaattacatcaagt

SEQ ID NO: 24032 - DNA, 704 bp, synthetic construct
  source 1..704: mol_type = other DNA
tgttttatatcccctccccacaagcaactttagaagtatcaagcaaataaggaccaataggagtccaacacccagttggatcatggtcaagcacttctgtctccccggacctagtagtgataggctgtacccacggccgaagatgaaaccgtccgttatccggccagctacttcgagaagcctagtagcatcaaagatctgtcttggcgtttcgctcagcgcgttttcccccgcgtagatcgggctgatgggtctccgcataccccacgggcgaccgtggcggaggccgcgtggcggcccgcctatggcgaaagccataggacgccatttcagtgacagggtgtgaagagcctattgagctagttggtagtcctccggcccctgaatgcggctaatcctaaccacggagcgtttaccagcaaaccagctggcggaacgtcgtaacgggtaactctgtggcggaaccgactactttgggtgtccgtgtttccttttgatcctattgtggctgcttatggtgacaacttacggttgttatcataaagcttttggattggccatccggaaagagttatcagtgtttgatattgttcggctttcacgcctaccattaagacaatcactttatttgttagttgcattttatcctgccaaggacattactgagtttcacctacaactttactcatacaattacatcaagt

SEQ ID NO: 24033 - DNA, 654 bp, synthetic construct
  source 1..654: mol_type = other DNA
ggaccaataggagtccaacacccagttggatcatggtcaagcacttctgtctccccggacctagtagtgataggctgtacccacggccgaagatgaaaccgtccgttatccggccagctacttcgagaagcctagtagcatcaaagatctgtcttggcgtttcgctcagcgcgttttcccccgcgtagatcgggctgatgggtctccgcataccccacgggcgaccgtggcggaggccgcgtggcggcccgcctatggcgaaagccataggacgccatttcagtgacagggtgtgaagagcctattgagctagttggtagtcctccggcccctgaatgcggctaatcctaaccacggagcgtttaccagcaaaccagctggcggaacgtcgtaacgggtaactctgtggcggaaccgactactttgggtgtccgtgtttccttttgatcctattgtggctgcttatggtgacaacttacggttgttatcataaagcttttggattggccatccggaaagagttatcagtgtttgatattgttcggctttcacgcctaccattaagacaatcactttatttgttagttgcattttatcctgccaaggacattactgagtttcacctacaactttactcatacaattacatcaagt

SEQ ID NO: 24034 - DNA, 604 bp, synthetic construct
  source 1..604: mol_type = other DNA
ctccccggacctagtagtgataggctgtacccacggccgaagatgaaaccgtccgttatccggccagctacttcgagaagcctagtagcatcaaagatctgtcttggcgtttcgctcagcgcgttttcccccgcgtagatcgggctgatgggtctccgcataccccacgggcgaccgtggcggaggccgcgtggcggcccgcctatggcgaaagccataggacgccatttcagtgacagggtgtgaagagcctattgagctagttggtagtcctccggcccctgaatgcggctaatcctaaccacggagcgtttaccagcaaaccagctggcggaacgtcgtaacgggtaactctgtggcggaaccgactactttgggtgtccgtgtttccttttgatcctattgtggctgcttatggtgacaacttacggttgttatcataaagcttttggattggccatccggaaagagttatcagtgtttgatattgttcggctttcacgcctaccattaagacaatcactttatttgttagttgcattttatcctgccaaggacattactgagtttcacctacaactttactcatacaattacatcaagt

SEQ ID NO: 24035 - DNA, 554 bp, synthetic construct
  source 1..554: mol_type = other DNA
gtccgttatccggccagctacttcgagaagcctagtagcatcaaagatctgtcttggcgtttcgctcagcgcgttttcccccgcgtagatcgggctgatgggtctccgcataccccacgggcgaccgtggcggaggccgcgtggcggcccgcctatggcgaaagccataggacgccatttcagtgacagggtgtgaagagcctattgagctagttggtagtcctccggcccctgaatgcggctaatcctaaccacggagcgtttaccagcaaaccagctggcggaacgtcgtaacgggtaactctgtggcggaaccgactactttgggtgtccgtgtttccttttgatcctattgtggctgcttatggtgacaacttacggttgttatcataaagcttttggattggccatccggaaagagttatcagtgtttgatattgttcggctttcacgcctaccattaagacaatcactttatttgttagttgcattttatcctgccaaggacattactgagtttcacctacaactttactcatacaattacatcaagt

SEQ ID NO: 24036 - DNA, 504 bp, synthetic construct
  source 1..504: mol_type = other DNA
gtcttggcgtttcgctcagcgcgttttcccccgcgtagatcgggctgatgggtctccgcataccccacgggcgaccgtggcggaggccgcgtggcggcccgcctatggcgaaagccataggacgccatttcagtgacagggtgtgaagagcctattgagctagttggtagtcctccggcccctgaatgcggctaatcctaaccacggagcgtttaccagcaaaccagctggcggaacgtcgtaacgggtaactctgtggcggaaccgactactttgggtgtccgtgtttccttttgatcctattgtggctgcttatggtgacaacttacggttgttatcataaagcttttggattggccatccggaaagagttatcagtgtttgatattgttcggctttcacgcctaccattaagacaatcactttatttgttagttgcattttatcctgccaaggacattactgagtttcacctacaactttactcatacaattacatcaagt

SEQ ID NO: 24037 - DNA, 758 bp, synthetic construct
  source 1..758: mol_type = other DNA
gcgcatgttcgcgtcgtcgtaagtctggattcccaaggcccactcggttcaacttcggtttccggacaaatacaaagaacctcagtcctcttggtactttctcgcctgagtctacaaagcgagaaacctgcccctctaacgccagacgagcggcataaaactcgaacttctggcacgttccaccaccccttctcctatcccaacccccattgcgctctcaaggtcgcgcttttccgagactagctcggattcaaaaagttcctggcaccctttaccccttcaggcccttaaggtaggaactgaccttgtgctgtgatctcggtgcggaagtgctactgcgtagtgattgtaagatccttttgtggttctgccctggcaaggctacagagtgctgtgatccgctgcggatgccatcctggtaacaggacccccagtgtgcgcaacagtatgttcacggtcttccgtgttcaccacattcggaacactgctttcgtgaaacagtgtgtgtccaatccctgtgatcagtatcaaccacaccacctaggaatgctaggaaggtaccccggttcgccgggatctgatcctaggctaattgtctacggtggtgctcctttttattttccacttcaactcactggttacaactgcttgatttctgtgtttgctgcttttctctgctctcactgccattctcaagtgttcacactgtccaagctcctttggttgttcgcttccacttgccactgtcaactcttgtc

SEQ ID NO: 24038 - DNA, 708 bp, synthetic construct
  source 1..708: mol_type = other DNA
aacttcggtttccggacaaatacaaagaacctcagtcctcttggtactttctcgcctgagtctacaaagcgagaaacctgcccctctaacgccagacgagcggcataaaactcgaacttctggcacgttccaccaccccttctcctatcccaacccccattgcgctctcaaggtcgcgcttttccgagactagctcggattcaaaaagttcctggcaccctttaccccttcaggcccttaaggtaggaactgaccttgtgctgtgatctcggtgcggaagtgctactgcgtagtgattgtaagatccttttgtggttctgccctggcaaggctacagagtgctgtgatccgctgcggatgccatcctggtaacaggacccccagtgtgcgcaacagtatgttcacggtcttccgtgttcaccacattcggaacactgctttcgtgaaacagtgtgtgtccaatccctgtgatcagtatcaaccacaccacctaggaatgctaggaaggtaccccggttcgccgggatctgatcctaggctaattgtctacggtggtgctcctttttattttccacttcaactcactggttacaactgcttgatttctgtgtttgctgcttttctctgctctcactgccattctcaagtgttcacactgtccaagctcctttggttgttcgcttccacttgccactgtcaactcttgtc

SEQ ID NO: 24039 - DNA, 658 bp, synthetic construct
  source 1..658: mol_type = other DNA
ctcgcctgagtctacaaagcgagaaacctgcccctctaacgccagacgagcggcataaaactcgaacttctggcacgttccaccaccccttctcctatcccaacccccattgcgctctcaaggtcgcgcttttccgagactagctcggattcaaaaagttcctggcaccctttaccccttcaggcccttaaggtaggaactgaccttgtgctgtgatctcggtgcggaagtgctactgcgtagtgattgtaagatccttttgtggttctgccctggcaaggctacagagtgctgtgatccgctgcggatgccatcctggtaacaggacccccagtgtgcgcaacagtatgttcacggtcttccgtgttcaccacattcggaacactgctttcgtgaaacagtgtgtgtccaatccctgtgatcagtatcaaccacaccacctaggaatgctaggaaggtaccccggttcgccgggatctgatcctaggctaattgtctacggtggtgctcctttttattttccacttcaactcactggttacaactgcttgatttctgtgtttgctgcttttctctgctctcactgccattctcaagtgttcacactgtccaagctcctttggttgttcgcttccacttgccactgtcaactcttgtc

SEQ ID NO: 24040 - DNA, 608 bp, synthetic construct
  source 1..608: mol_type = other DNA
cggcataaaactcgaacttctggcacgttccaccaccccttctcctatcccaacccccattgcgctctcaaggtcgcgcttttccgagactagctcggattcaaaaagttcctggcaccctttaccccttcaggcccttaaggtaggaactgaccttgtgctgtgatctcggtgcggaagtgctactgcgtagtgattgtaagatccttttgtggttctgccctggcaaggctacagagtgctgtgatccgctgcggatgccatcctggtaacaggacccccagtgtgcgcaacagtatgttcacggtcttccgtgttcaccacattcggaacactgctttcgtgaaacagtgtgtgtccaatccctgtgatcagtatcaaccacaccacctaggaatgctaggaaggtaccccggttcgccgggatctgatcctaggctaattgtctacggtggtgctcctttttattttccacttcaactcactggttacaactgcttgatttctgtgtttgctgcttttctctgctctcactgccattctcaagtgttcacactgtccaagctcctttggttgttcgcttccacttgccactgtcaactcttgtc

SEQ ID NO: 24041 - DNA, 558 bp, synthetic construct
  source 1..558: mol_type = other DNA
caacccccattgcgctctcaaggtcgcgcttttccgagactagctcggattcaaaaagttcctggcaccctttaccccttcaggcccttaaggtaggaactgaccttgtgctgtgatctcggtgcggaagtgctactgcgtagtgattgtaagatccttttgtggttctgccctggcaaggctacagagtgctgtgatccgctgcggatgccatcctggtaacaggacccccagtgtgcgcaacagtatgttcacggtcttccgtgttcaccacattcggaacactgctttcgtgaaacagtgtgtgtccaatccctgtgatcagtatcaaccacaccacctaggaatgctaggaaggtaccccggttcgccgggatctgatcctaggctaattgtctacggtggtgctcctttttattttccacttcaactcactggttacaactgcttgatttctgtgtttgctgcttttctctgctctcactgccattctcaagtgttcacactgtccaagctcctttggttgttcgcttccacttgccactgtcaactcttgtc

SEQ ID NO: 24042 - DNA, 508 bp, synthetic construct
  source 1..508: mol_type = other DNA
tcaaaaagttcctggcaccctttaccccttcaggcccttaaggtaggaactgaccttgtgctgtgatctcggtgcggaagtgctactgcgtagtgattgtaagatccttttgtggttctgccctggcaaggctacagagtgctgtgatccgctgcggatgccatcctggtaacaggacccccagtgtgcgcaacagtatgttcacggtcttccgtgttcaccacattcggaacactgctttcgtgaaacagtgtgtgtccaatccctgtgatcagtatcaaccacaccacctaggaatgctaggaaggtaccccggttcgccgggatctgatcctaggctaattgtctacggtggtgctcctttttattttccacttcaactcactggttacaactgcttgatttctgtgtttgctgcttttctctgctctcactgccattctcaagtgttcacactgtccaagctcctttggttgttcgcttccacttgccactgtcaactcttgtc

SEQ ID NO: 24043 - DNA, 759 bp, synthetic construct
  source 1..759: mol_type = other DNA
tacactggtatgccttacctcggtattacggtaccgatgtatatagtacctttgtacgcctgttttatatccctcccccacatgtaaccttagaagtttacacaaacaaagaccaataggagtccaacacccagttggattgcggtcaagcacttctgtttccccggacctagtagtgataggctgtacccacggccgaagatgaacccgtccgttatccggctacctacttcgggaagcctagtaacattctgaagtctctgaggcgtttcgctcagcacgaccccggtgtagatcgggctgatgggtctccgcataccccacgggcgaccgtggcggaggccgcgttggcggcccgcctatggcgaaagccataggacgcctcttagatgacagggtgtgaagagcctactgagctgggtagtagtcctccggcccctgaatgcggctaatcctaaccacggagcgtccaccagcaatccagctggcagggcgtcgtaacgggcaactctgtggcggaaccgactactttgggtgtccgtgtttccttttgatcctattttggctgcttatggtgacaacgataagttgttatcataaagctcttgggttggccacctggaaaaagttatcagtgtttgatattgttcggctctcacgcctaccaataagacaagccctatatttacttgttgcattttactcgtcagaagaaatcacagagtatcatttggatttgttactcacattaaggacaag

SEQ ID NO: 24044 - DNA, 709 bp, synthetic construct
  source 1..709: mol_type = other DNA
tttgtacgcctgttttatatccctcccccacatgtaaccttagaagtttacacaaacaaagaccaataggagtccaacacccagttggattgcggtcaagcacttctgtttccccggacctagtagtgataggctgtacccacggccgaagatgaacccgtccgttatccggctacctacttcgggaagcctagtaacattctgaagtctctgaggcgtttcgctcagcacgaccccggtgtagatcgggctgatgggtctccgcataccccacgggcgaccgtggcggaggccgcgttggcggcccgcctatggcgaaagccataggacgcctcttagatgacagggtgtgaagagcctactgagctgggtagtagtcctccggcccctgaatgcggctaatcctaaccacggagcgtccaccagcaatccagctggcagggcgtcgtaacgggcaactctgtggcggaaccgactactttgggtgtccgtgtttccttttgatcctattttggctgcttatggtgacaacgataagttgttatcataaagctcttgggttggccacctggaaaaagttatcagtgtttgatattgttcggctctcacgcctaccaataagacaagccctatatttacttgttgcattttactcgtcagaagaaatcacagagtatcatttggatttgttactcacattaaggacaag

SEQ ID NO: 24045 - DNA, 659 bp, synthetic construct
  source 1..659: mol_type = other DNA
cacaaacaaagaccaataggagtccaacacccagttggattgcggtcaagcacttctgtttccccggacctagtagtgataggctgtacccacggccgaagatgaacccgtccgttatccggctacctacttcgggaagcctagtaacattctgaagtctctgaggcgtttcgctcagcacgaccccggtgtagatcgggctgatgggtctccgcataccccacgggcgaccgtggcggaggccgcgttggcggcccgcctatggcgaaagccataggacgcctcttagatgacagggtgtgaagagcctactgagctgggtagtagtcctccggcccctgaatgcggctaatcctaaccacggagcgtccaccagcaatccagctggcagggcgtcgtaacgggcaactctgtggcggaaccgactactttgggtgtccgtgtttccttttgatcctattttggctgcttatggtgacaacgataagttgttatcataaagctcttgggttggccacctggaaaaagttatcagtgtttgatattgttcggctctcacgcctaccaataagacaagccctatatttacttgttgcattttactcgtcagaagaaatcacagagtatcatttggatttgttactcacattaaggacaag

SEQ ID NO: 24046 - DNA, 609 bp, synthetic construct
  source 1..609: mol_type = other DNA
cacttctgtttccccggacctagtagtgataggctgtacccacggccgaagatgaacccgtccgttatccggctacctacttcgggaagcctagtaacattctgaagtctctgaggcgtttcgctcagcacgaccccggtgtagatcgggctgatgggtctccgcataccccacgggcgaccgtggcggaggccgcgttggcggcccgcctatggcgaaagccataggacgcctcttagatgacagggtgtgaagagcctactgagctgggtagtagtcctccggcccctgaatgcggctaatcctaaccacggagcgtccaccagcaatccagctggcagggcgtcgtaacgggcaactctgtggcggaaccgactactttgggtgtccgtgtttccttttgatcctattttggctgcttatggtgacaacgataagttgttatcataaagctcttgggttggccacctggaaaaagttatcagtgtttgatattgttcggctctcacgcctaccaataagacaagccctatatttacttgttgcattttactcgtcagaagaaatcacagagtatcatttggatttgttactcacattaaggacaag

SEQ ID NO: 24047 - DNA, 559 bp, synthetic construct
  source 1..559: mol_type = other DNA
gatgaacccgtccgttatccggctacctacttcgggaagcctagtaacattctgaagtctctgaggcgtttcgctcagcacgaccccggtgtagatcgggctgatgggtctccgcataccccacgggcgaccgtggcggaggccgcgttggcggcccgcctatggcgaaagccataggacgcctcttagatgacagggtgtgaagagcctactgagctgggtagtagtcctccggcccctgaatgcggctaatcctaaccacggagcgtccaccagcaatccagctggcagggcgtcgtaacgggcaactctgtggcggaaccgactactttgggtgtccgtgtttccttttgatcctattttggctgcttatggtgacaacgataagttgttatcataaagctcttgggttggccacctggaaaaagttatcagtgtttgatattgttcggctctcacgcctaccaataagacaagccctatatttacttgttgcattttactcgtcagaagaaatcacagagtatcatttggatttgttactcacattaaggacaag

SEQ ID NO: 24048 - DNA, 509 bp, synthetic construct
  source 1..509: mol_type = other DNA
tctgaagtctctgaggcgtttcgctcagcacgaccccggtgtagatcgggctgatgggtctccgcataccccacgggcgaccgtggcggaggccgcgttggcggcccgcctatggcgaaagccataggacgcctcttagatgacagggtgtgaagagcctactgagctgggtagtagtcctccggcccctgaatgcggctaatcctaaccacggagcgtccaccagcaatccagctggcagggcgtcgtaacgggcaactctgtggcggaaccgactactttgggtgtccgtgtttccttttgatcctattttggctgcttatggtgacaacgataagttgttatcataaagctcttgggttggccacctggaaaaagttatcagtgtttgatattgttcggctctcacgcctaccaataagacaagccctatatttacttgttgcattttactcgtcagaagaaatcacagagtatcatttggatttgttactcacattaaggacaag

SEQ ID NO: 24049 - DNA, 759 bp, synthetic construct
  source 1..759: mol_type = other DNA
ttagtacctttgtacgcctgttttcccctcccttaaacaaattaagattaccactactgaggggagtagtccgactccgctccagcactgctgcaccagtgaattggtacgctagtacctctgcacggagtagatggtatcccccccccgaaacttagaagtttgcaacaaacccgaccaataggtgcgtggcatccagctgcgtaaaggtcaagcacttctgtttccccggtccacaaggatcgttacccgcccaacccactgcgagaagcctattaactggccaaacaactgaagagttgcgctccgccacgacccctgtggtagctctggaagatggggctcgcacttcccccgtggtaacacggttgcctgcccgcgcgtgcttccgggttcgacctagtgtcgttcactccaaagttgcgtaaccagccaagagcctattgcgctgggatggttttcctccggggccgtgaatgctgctaatcctaacctccgagcgtgtgcgcacaaaccagtgttgctacgtcgtaacgcgtaagttggaggcggaacagactactttcggtaccccgtgtttcctcttatttttatataatattttatggtgacaattgctgagatttgtgatttggccaccctaccattgaatattgctttgtattatctggttgcatttcataaagcttcagaaatacctgcttcctatatcgatctacttgtattcctcaatttaaagcacaaattagagaacataag

SEQ ID NO: 24050 - DNA, 709 bp, synthetic construct
  source 1..709: mol_type = other DNA
ccactactgaggggagtagtccgactccgctccagcactgctgcaccagtgaattggtacgctagtacctctgcacggagtagatggtatcccccccccgaaacttagaagtttgcaacaaacccgaccaataggtgcgtggcatccagctgcgtaaaggtcaagcacttctgtttccccggtccacaaggatcgttacccgcccaacccactgcgagaagcctattaactggccaaacaactgaagagttgcgctccgccacgacccctgtggtagctctggaagatggggctcgcacttcccccgtggtaacacggttgcctgcccgcgcgtgcttccgggttcgacctagtgtcgttcactccaaagttgcgtaaccagccaagagcctattgcgctgggatggttttcctccggggccgtgaatgctgctaatcctaacctccgagcgtgtgcgcacaaaccagtgttgctacgtcgtaacgcgtaagttggaggcggaacagactactttcggtaccccgtgtttcctcttatttttatataatattttatggtgacaattgctgagatttgtgatttggccaccctaccattgaatattgctttgtattatctggttgcatttcataaagcttcagaaatacctgcttcctatatcgatctacttgtattcctcaatttaaagcacaaattagagaacataag

SEQ ID NO: 24051 - DNA, 659 bp, synthetic construct
  source 1..659: mol_type = other DNA
gaattggtacgctagtacctctgcacggagtagatggtatcccccccccgaaacttagaagtttgcaacaaacccgaccaataggtgcgtggcatccagctgcgtaaaggtcaagcacttctgtttccccggtccacaaggatcgttacccgcccaacccactgcgagaagcctattaactggccaaacaactgaagagttgcgctccgccacgacccctgtggtagctctggaagatggggctcgcacttcccccgtggtaacacggttgcctgcccgcgcgtgcttccgggttcgacctagtgtcgttcactccaaagttgcgtaaccagccaagagcctattgcgctgggatggttttcctccggggccgtgaatgctgctaatcctaacctccgagcgtgtgcgcacaaaccagtgttgctacgtcgtaacgcgtaagttggaggcggaacagactactttcggtaccccgtgtttcctcttatttttatataatattttatggtgacaattgctgagatttgtgatttggccaccctaccattgaatattgctttgtattatctggttgcatttcataaagcttcagaaatacctgcttcctatatcgatctacttgtattcctcaatttaaagcacaaattagagaacataag

SEQ ID NO: 24052 - DNA, 609 bp, synthetic construct
  source 1..609: mol_type = other DNA
aaacttagaagtttgcaacaaacccgaccaataggtgcgtggcatccagctgcgtaaaggtcaagcacttctgtttccccggtccacaaggatcgttacccgcccaacccactgcgagaagcctattaactggccaaacaactgaagagttgcgctccgccacgacccctgtggtagctctggaagatggggctcgcacttcccccgtggtaacacggttgcctgcccgcgcgtgcttccgggttcgacctagtgtcgttcactccaaagttgcgtaaccagccaagagcctattgcgctgggatggttttcctccggggccgtgaatgctgctaatcctaacctccgagcgtgtgcgcacaaaccagtgttgctacgtcgtaacgcgtaagttggaggcggaacagactactttcggtaccccgtgtttcctcttatttttatataatattttatggtgacaattgctgagatttgtgatttggccaccctaccattgaatattgctttgtattatctggttgcatttcataaagcttcagaaatacctgcttcctatatcgatctacttgtattcctcaatttaaagcacaaattagagaacataag

SEQ ID NO: 24053 - DNA, 559 bp, synthetic construct
  source 1..559: mol_type = other DNA
tgcgtaaaggtcaagcacttctgtttccccggtccacaaggatcgttacccgcccaacccactgcgagaagcctattaactggccaaacaactgaagagttgcgctccgccacgacccctgtggtagctctggaagatggggctcgcacttcccccgtggtaacacggttgcctgcccgcgcgtgcttccgggttcgacctagtgtcgttcactccaaagttgcgtaaccagccaagagcctattgcgctgggatggttttcctccggggccgtgaatgctgctaatcctaacctccgagcgtgtgcgcacaaaccagtgttgctacgtcgtaacgcgtaagttggaggcggaacagactactttcggtaccccgtgtttcctcttatttttatataatattttatggtgacaattgctgagatttgtgatttggccaccctaccattgaatattgctttgtattatctggttgcatttcataaagcttcagaaatacctgcttcctatatcgatctacttgtattcctcaatttaaagcacaaattagagaacataag

SEQ ID NO: 24054 - DNA, 509 bp, synthetic construct
  source 1..509: mol_type = other DNA
cgcccaacccactgcgagaagcctattaactggccaaacaactgaagagttgcgctccgccacgacccctgtggtagctctggaagatggggctcgcacttcccccgtggtaacacggttgcctgcccgcgcgtgcttccgggttcgacctagtgtcgttcactccaaagttgcgtaaccagccaagagcctattgcgctgggatggttttcctccggggccgtgaatgctgctaatcctaacctccgagcgtgtgcgcacaaaccagtgttgctacgtcgtaacgcgtaagttggaggcggaacagactactttcggtaccccgtgtttcctcttatttttatataatattttatggtgacaattgctgagatttgtgatttggccaccctaccattgaatattgctttgtattatctggttgcatttcataaagcttcagaaatacctgcttcctatatcgatctacttgtattcctcaatttaaagcacaaattagagaacataag

SEQ ID NO: 24055 - DNA, 762 bp, synthetic construct
  source 1..762: mol_type = other DNA
tactctggttcgattagaacctttgtacgcctgttttcccctcccttaaacaaattaagatctctgccaatgtggggagtagtccgactccgcaccgatacgtcgcaccagcagaccggttcgcttaggacccttctgcggattggtatgagtccctctcccgaaacttagaagtttggacaaaccgaccaataggtgcgtggcatccagccatgttacggtcaagcacctctgtttccccggtcagaaatgatcgttacccgccctacccactacgaaaagcctattaaccattgaaagtgatgaggagttgcgctcagccatgaccccgatggtagctctgagggatggagctcgcagttcccccgtggtaacacggttgcttgctcgcgtgtgcccttgggttcgaccatttggtcgttcactccaaatcatcgtaaatggccaagagccaattgtgctggggaggttttcctccggagccgtgaatgctgctaatcccaacctccgagcgtgtgcgcacaatccagtgttgctacgtcgtaacgcgtaagttggaggcggaacagactactttcggtactccgtgtttccttttattttattattatattaatggtgacactgtttgagatttgcgagattgccaaattgccactcaacattgcactctattatttggtatcattctacaatacctcagaacttacggttgagctcattgatttcctcgtctttttgaataaaaataaattaaagaca

SEQ ID NO: 24056 - DNA, 712 bp, synthetic construct
  source 1..712: mol_type = other DNA
caaattaagatctctgccaatgtggggagtagtccgactccgcaccgatacgtcgcaccagcagaccggttcgcttaggacccttctgcggattggtatgagtccctctcccgaaacttagaagtttggacaaaccgaccaataggtgcgtggcatccagccatgttacggtcaagcacctctgtttccccggtcagaaatgatcgttacccgccctacccactacgaaaagcctattaaccattgaaagtgatgaggagttgcgctcagccatgaccccgatggtagctctgagggatggagctcgcagttcccccgtggtaacacggttgcttgctcgcgtgtgcccttgggttcgaccatttggtcgttcactccaaatcatcgtaaatggccaagagccaattgtgctggggaggttttcctccggagccgtgaatgctgctaatcccaacctccgagcgtgtgcgcacaatccagtgttgctacgtcgtaacgcgtaagttggaggcggaacagactactttcggtactccgtgtttccttttattttattattatattaatggtgacactgtttgagatttgcgagattgccaaattgccactcaacattgcactctattatttggtatcattctacaatacctcagaacttacggttgagctcattgatttcctcgtctttttgaataaaaataaattaaagaca

SEQ ID NO: 24057 - DNA, 662 bp, synthetic construct
  source 1..662: mol_type = other DNA
cgtcgcaccagcagaccggttcgcttaggacccttctgcggattggtatgagtccctctcccgaaacttagaagtttggacaaaccgaccaataggtgcgtggcatccagccatgttacggtcaagcacctctgtttccccggtcagaaatgatcgttacccgccctacccactacgaaaagcctattaaccattgaaagtgatgaggagttgcgctcagccatgaccccgatggtagctctgagggatggagctcgcagttcccccgtggtaacacggttgcttgctcgcgtgtgcccttgggttcgaccatttggtcgttcactccaaatcatcgtaaatggccaagagccaattgtgctggggaggttttcctccggagccgtgaatgctgctaatcccaacctccgagcgtgtgcgcacaatccagtgttgctacgtcgtaacgcgtaagttggaggcggaacagactactttcggtactccgtgtttccttttattttattattatattaatggtgacactgtttgagatttgcgagattgccaaattgccactcaacattgcactctattatttggtatcattctacaatacctcagaacttacggttgagctcattgatttcctcgtctttttgaataaaaataaattaaagaca

SEQ ID NO: 24058 - DNA, 612 bp, synthetic construct
  source 1..612: mol_type = other DNA
agtccctctcccgaaacttagaagtttggacaaaccgaccaataggtgcgtggcatccagccatgttacggtcaagcacctctgtttccccggtcagaaatgatcgttacccgccctacccactacgaaaagcctattaaccattgaaagtgatgaggagttgcgctcagccatgaccccgatggtagctctgagggatggagctcgcagttcccccgtggtaacacggttgcttgctcgcgtgtgcccttgggttcgaccatttggtcgttcactccaaatcatcgtaaatggccaagagccaattgtgctggggaggttttcctccggagccgtgaatgctgctaatcccaacctccgagcgtgtgcgcacaatccagtgttgctacgtcgtaacgcgtaagttggaggcggaacagactactttcggtactccgtgtttccttttattttattattatattaatggtgacactgtttgagatttgcgagattgccaaattgccactcaacattgcactctattatttggtatcattctacaatacctcagaacttacggttgagctcattgatttcctcgtctttttgaataaaaataaattaaagaca

SEQ ID NO: 24059 - DNA, 562 bp, synthetic construct
  source 1..562: mol_type = other DNA
tggcatccagccatgttacggtcaagcacctctgtttccccggtcagaaatgatcgttacccgccctacccactacgaaaagcctattaaccattgaaagtgatgaggagttgcgctcagccatgaccccgatggtagctctgagggatggagctcgcagttcccccgtggtaacacggttgcttgctcgcgtgtgcccttgggttcgaccatttggtcgttcactccaaatcatcgtaaatggccaagagccaattgtgctggggaggttttcctccggagccgtgaatgctgctaatcccaacctccgagcgtgtgcgcacaatccagtgttgctacgtcgtaacgcgtaagttggaggcggaacagactactttcggtactccgtgtttccttttattttattattatattaatggtgacactgtttgagatttgcgagattgccaaattgccactcaacattgcactctattatttggtatcattctacaatacctcagaacttacggttgagctcattgatttcctcgtctttttgaataaaaataaattaaagaca

SEQ ID NO: 24060 - DNA, 512 bp, synthetic construct
  source 1..512: mol_type = other DNA
tgatcgttacccgccctacccactacgaaaagcctattaaccattgaaagtgatgaggagttgcgctcagccatgaccccgatggtagctctgagggatggagctcgcagttcccccgtggtaacacggttgcttgctcgcgtgtgcccttgggttcgaccatttggtcgttcactccaaatcatcgtaaatggccaagagccaattgtgctggggaggttttcctccggagccgtgaatgctgctaatcccaacctccgagcgtgtgcgcacaatccagtgttgctacgtcgtaacgcgtaagttggaggcggaacagactactttcggtactccgtgtttccttttattttattattatattaatggtgacactgtttgagatttgcgagattgccaaattgccactcaacattgcactctattatttggtatcattctacaatacctcagaacttacggttgagctcattgatttcctcgtctttttgaataaaaataaattaaagaca

SEQ ID NO: 24061 - DNA, 763 bp, synthetic construct
  source 1..763: mol_type = other DNA
tacactggtatgccagtaccttggtatcacggtaccattgtacgccagtacctttgtacgcctgttttatattcccttccccatacgtaactttagaagtttaagcaaattaagaccaataggagtccaacaaccagttggattgcggtcaagcacttctgtttccccggacctagtagtgataggctgtacccacggccgaagatgaacccgtccgttatccggccagctacttcgagaagcctagtagcatcaaagatctgtcttggcgtttcgctcagcgcgttccccccgcgtagatcgggctgatgggtctccgcataccccacgggcgaccgtggcggaggccgcgtggcggcccgcctatggcgaaagccataggacgccatttcagtgacagggtgtgaagagcctattgagctagttggtagtcctccggcccctgaatgcggctaatcctaaccactgagcgtccaccaacaaaccagttgggagggcgtcgtaacgggtaactcggtggcggaaccgactactttgggtgtccgtgtttccttttgatcctattttggctgcttatggtgacaacgataagttgttatcataaagcttttgggttggccacctggaaaaagttatcagtgtttgatattgttcggctttcacgcctaccattcagactaactctttatttgcttattgcattttacccatcggaggatattacagacttccatctacaactcttattcacattatcaacaca

SEQ ID NO: 24062 - DNA, 713 bp, synthetic construct
  source 1..713: mol_type = other DNA
cctttgtacgcctgttttatattcccttccccatacgtaactttagaagtttaagcaaattaagaccaataggagtccaacaaccagttggattgcggtcaagcacttctgtttccccggacctagtagtgataggctgtacccacggccgaagatgaacccgtccgttatccggccagctacttcgagaagcctagtagcatcaaagatctgtcttggcgtttcgctcagcgcgttccccccgcgtagatcgggctgatgggtctccgcataccccacgggcgaccgtggcggaggccgcgtggcggcccgcctatggcgaaagccataggacgccatttcagtgacagggtgtgaagagcctattgagctagttggtagtcctccggcccctgaatgcggctaatcctaaccactgagcgtccaccaacaaaccagttgggagggcgtcgtaacgggtaactcggtggcggaaccgactactttgggtgtccgtgtttccttttgatcctattttggctgcttatggtgacaacgataagttgttatcataaagcttttgggttggccacctggaaaaagttatcagtgtttgatattgttcggctttcacgcctaccattcagactaactctttatttgcttattgcattttacccatcggaggatattacagacttccatctacaactcttattcacattatcaacaca

SEQ ID NO: 24063 - DNA, 663 bp, synthetic construct
  source 1..663: mol_type = other DNA
ttaagcaaattaagaccaataggagtccaacaaccagttggattgcggtcaagcacttctgtttccccggacctagtagtgataggctgtacccacggccgaagatgaacccgtccgttatccggccagctacttcgagaagcctagtagcatcaaagatctgtcttggcgtttcgctcagcgcgttccccccgcgtagatcgggctgatgggtctccgcataccccacgggcgaccgtggcggaggccgcgtggcggcccgcctatggcgaaagccataggacgccatttcagtgacagggtgtgaagagcctattgagctagttggtagtcctccggcccctgaatgcggctaatcctaaccactgagcgtccaccaacaaaccagttgggagggcgtcgtaacgggtaactcggtggcggaaccgactactttgggtgtccgtgtttccttttgatcctattttggctgcttatggtgacaacgataagttgttatcataaagcttttgggttggccacctggaaaaagttatcagtgtttgatattgttcggctttcacgcctaccattcagactaactctttatttgcttattgcattttacccatcggaggatattacagacttccatctacaactcttattcacattatcaacaca

SEQ ID NO: 24064 - DNA, 613 bp, synthetic construct
  source 1..613: mol_type = other DNA
aagcacttctgtttccccggacctagtagtgataggctgtacccacggccgaagatgaacccgtccgttatccggccagctacttcgagaagcctagtagcatcaaagatctgtcttggcgtttcgctcagcgcgttccccccgcgtagatcgggctgatgggtctccgcataccccacgggcgaccgtggcggaggccgcgtggcggcccgcctatggcgaaagccataggacgccatttcagtgacagggtgtgaagagcctattgagctagttggtagtcctccggcccctgaatgcggctaatcctaaccactgagcgtccaccaacaaaccagttgggagggcgtcgtaacgggtaactcggtggcggaaccgactactttgggtgtccgtgtttccttttgatcctattttggctgcttatggtgacaacgataagttgttatcataaagcttttgggttggccacctggaaaaagttatcagtgtttgatattgttcggctttcacgcctaccattcagactaactctttatttgcttattgcattttacccatcggaggatattacagacttccatctacaactcttattcacattatcaacaca

SEQ ID NO: 24065 - DNA, 563 bp, synthetic construct
  source 1..563: mol_type = other DNA
gaagatgaacccgtccgttatccggccagctacttcgagaagcctagtagcatcaaagatctgtcttggcgtttcgctcagcgcgttccccccgcgtagatcgggctgatgggtctccgcataccccacgggcgaccgtggcggaggccgcgtggcggcccgcctatggcgaaagccataggacgccatttcagtgacagggtgtgaagagcctattgagctagttggtagtcctccggcccctgaatgcggctaatcctaaccactgagcgtccaccaacaaaccagttgggagggcgtcgtaacgggtaactcggtggcggaaccgactactttgggtgtccgtgtttccttttgatcctattttggctgcttatggtgacaacgataagttgttatcataaagcttttgggttggccacctggaaaaagttatcagtgtttgatattgttcggctttcacgcctaccattcagactaactctttatttgcttattgcattttacccatcggaggatattacagacttccatctacaactcttattcacattatcaacaca

SEQ ID NO: 24066 - DNA, 513 bp, synthetic construct
  source 1..513: mol_type = other DNA
catcaaagatctgtcttggcgtttcgctcagcgcgttccccccgcgtagatcgggctgatgggtctccgcataccccacgggcgaccgtggcggaggccgcgtggcggcccgcctatggcgaaagccataggacgccatttcagtgacagggtgtgaagagcctattgagctagttggtagtcctccggcccctgaatgcggctaatcctaaccactgagcgtccaccaacaaaccagttgggagggcgtcgtaacgggtaactcggtggcggaaccgactactttgggtgtccgtgtttccttttgatcctattttggctgcttatggtgacaacgataagttgttatcataaagcttttgggttggccacctggaaaaagttatcagtgtttgatattgttcggctttcacgcctaccattcagactaactctttatttgcttattgcattttacccatcggaggatattacagacttccatctacaactcttattcacattatcaacaca

SEQ ID NO: 24067 - DNA, 764 bp, synthetic construct
  source 1..764: mol_type = other DNA
tactctggttcgattagaacctttgtacgcctgttttccccacccttaaataaatcaagatctctgccaatgtggggagtagtccgactccgcaccgatacgtcgcaccagcagaccggttcgcttaggacccttctgcggattggtatgagttcccacccttgtaacttagaagttctcacaaaccgaccaatagcggcgttgcatccagcagcgcaacggtcaagcacttctgtttccccggcgcgtcgcgtcgttacccgcccggtctactacgggaagcccagtatggtcccaattgattgcgcagttgcgttcggccacaaccccagtggtagctctgaggaatggggctcgcccttcccccacagtaatgtggtggcctgcccgcgcgtgtcctcgggttcactcctagagtgttcactgcaattttgagtaagatctgaagagcctactgtgctaggttggttttcctccggagccgtgaatgctgctaatcccaacctccgagcgtgtgcgcacaatccagtgttgctacgtcgtaacgcgtaagttggaggcggaacagactactttcggtactccgtgtttccttattttattcacttattttatggtgacactgactgatatttgtgagtttgctcggctgcccttgaatattgctttgtactatttaatagcatttcatagaaccactcaactttcaattgagcttattgacttcgccgtctttctcaatcagatacacaaaaccacacata

SEQ ID NO: 24068 - DNA, 714 bp, synthetic construct
  source 1..714: mol_type = other DNA
taaatcaagatctctgccaatgtggggagtagtccgactccgcaccgatacgtcgcaccagcagaccggttcgcttaggacccttctgcggattggtatgagttcccacccttgtaacttagaagttctcacaaaccgaccaatagcggcgttgcatccagcagcgcaacggtcaagcacttctgtttccccggcgcgtcgcgtcgttacccgcccggtctactacgggaagcccagtatggtcccaattgattgcgcagttgcgttcggccacaaccccagtggtagctctgaggaatggggctcgcccttcccccacagtaatgtggtggcctgcccgcgcgtgtcctcgggttcactcctagagtgttcactgcaattttgagtaagatctgaagagcctactgtgctaggttggttttcctccggagccgtgaatgctgctaatcccaacctccgagcgtgtgcgcacaatccagtgttgctacgtcgtaacgcgtaagttggaggcggaacagactactttcggtactccgtgtttccttattttattcacttattttatggtgacactgactgatatttgtgagtttgctcggctgcccttgaatattgctttgtactatttaatagcatttcatagaaccactcaactttcaattgagcttattgacttcgccgtctttctcaatcagatacacaaaaccacacata

SEQ ID NO: 24069 - DNA, 664 bp, synthetic construct
  source 1..664: mol_type = other DNA
cgtcgcaccagcagaccggttcgcttaggacccttctgcggattggtatgagttcccacccttgtaacttagaagttctcacaaaccgaccaatagcggcgttgcatccagcagcgcaacggtcaagcacttctgtttccccggcgcgtcgcgtcgttacccgcccggtctactacgggaagcccagtatggtcccaattgattgcgcagttgcgttcggccacaaccccagtggtagctctgaggaatggggctcgcccttcccccacagtaatgtggtggcctgcccgcgcgtgtcctcgggttcactcctagagtgttcactgcaattttgagtaagatctgaagagcctactgtgctaggttggttttcctccggagccgtgaatgctgctaatcccaacctccgagcgtgtgcgcacaatccagtgttgctacgtcgtaacgcgtaagttggaggcggaacagactactttcggtactccgtgtttccttattttattcacttattttatggtgacactgactgatatttgtgagtttgctcggctgcccttgaatattgctttgtactatttaatagcatttcatagaaccactcaactttcaattgagcttattgacttcgccgtctttctcaatcagatacacaaaaccacacata

SEQ ID NO: 24070 - DNA, 614 bp, synthetic construct
  source 1..614: mol_type = other DNA
agttcccacccttgtaacttagaagttctcacaaaccgaccaatagcggcgttgcatccagcagcgcaacggtcaagcacttctgtttccccggcgcgtcgcgtcgttacccgcccggtctactacgggaagcccagtatggtcccaattgattgcgcagttgcgttcggccacaaccccagtggtagctctgaggaatggggctcgcccttcccccacagtaatgtggtggcctgcccgcgcgtgtcctcgggttcactcctagagtgttcactgcaattttgagtaagatctgaagagcctactgtgctaggttggttttcctccggagccgtgaatgctgctaatcccaacctccgagcgtgtgcgcacaatccagtgttgctacgtcgtaacgcgtaagttggaggcggaacagactactttcggtactccgtgtttccttattttattcacttattttatggtgacactgactgatatttgtgagtttgctcggctgcccttgaatattgctttgtactatttaatagcatttcatagaaccactcaactttcaattgagcttattgacttcgccgtctttctcaatcagatacacaaaaccacacata

SEQ ID NO: 24071 - DNA, 564 bp, synthetic construct
  source 1..564: mol_type = other DNA
gttgcatccagcagcgcaacggtcaagcacttctgtttccccggcgcgtcgcgtcgttacccgcccggtctactacgggaagcccagtatggtcccaattgattgcgcagttgcgttcggccacaaccccagtggtagctctgaggaatggggctcgcccttcccccacagtaatgtggtggcctgcccgcgcgtgtcctcgggttcactcctagagtgttcactgcaattttgagtaagatctgaagagcctactgtgctaggttggttttcctccggagccgtgaatgctgctaatcccaacctccgagcgtgtgcgcacaatccagtgttgctacgtcgtaacgcgtaagttggaggcggaacagactactttcggtactccgtgtttccttattttattcacttattttatggtgacactgactgatatttgtgagtttgctcggctgcccttgaatattgctttgtactatttaatagcatttcatagaaccactcaactttcaattgagcttattgacttcgccgtctttctcaatcagatacacaaaaccacacata

SEQ ID NO: 24072 - DNA, 514 bp, synthetic construct
  source 1..514: mol_type = other DNA
gcgtcgttacccgcccggtctactacgggaagcccagtatggtcccaattgattgcgcagttgcgttcggccacaaccccagtggtagctctgaggaatggggctcgcccttcccccacagtaatgtggtggcctgcccgcgcgtgtcctcgggttcactcctagagtgttcactgcaattttgagtaagatctgaagagcctactgtgctaggttggttttcctccggagccgtgaatgctgctaatcccaacctccgagcgtgtgcgcacaatccagtgttgctacgtcgtaacgcgtaagttggaggcggaacagactactttcggtactccgtgtttccttattttattcacttattttatggtgacactgactgatatttgtgagtttgctcggctgcccttgaatattgctttgtactatttaatagcatttcatagaaccactcaactttcaattgagcttattgacttcgccgtctttctcaatcagatacacaaaaccacacata

SEQ ID NO: 24073 - DNA, 764 bp, synthetic construct
  source 1..764: mol_type = other DNA
tactctggtacgctagtacactagcacgttagtgcttttgtacgccagtacctttgtacgcctgttttattttcccttccccacatgtaactttagaagtttagaaacaaacaatgaccaataggagtccagcatccagttggattgcggtcaagtacttctgtttccccggacctagtagtgataggctgtacccacggccgaagatgaacccgtccgttatccggctacctacttcgggaagcctagtaacattctgaagtctctgaggcgtttcgctcagcacgaccccggtgtagatcgggctgatgggtctccgcataccccacgggtgaccgtggcggaggccgcgttggcggcccgcctatggcgaaagccataggacgcctcttagatgacagggtgtgaagagcctactgagctgggtagtagtcctccggcccctgaatgcggctaatcctaaccacggagcgtccaccggcaaaccggtcgggagggcgtcgtaacgggtaactctgtggcggaaccgactactttgggtgtccgtgtttccttttgatcctattttggctgcttatggtgacaacgataagttgttatcataaagcttttgggttggccacctggaaaaagttatcagtgtttgatattgttcggctctcacgccttccaacaaaacaggccttacttcttttaattgcattttatccatcggaggttattacagatttccatctgaagcttcttctcacagtagcagtaaa

SEQ ID NO: 24074 - DNA, 714 bp, synthetic construct
  source 1..714: mol_type = other DNA
cctttgtacgcctgttttattttcccttccccacatgtaactttagaagtttagaaacaaacaatgaccaataggagtccagcatccagttggattgcggtcaagtacttctgtttccccggacctagtagtgataggctgtacccacggccgaagatgaacccgtccgttatccggctacctacttcgggaagcctagtaacattctgaagtctctgaggcgtttcgctcagcacgaccccggtgtagatcgggctgatgggtctccgcataccccacgggtgaccgtggcggaggccgcgttggcggcccgcctatggcgaaagccataggacgcctcttagatgacagggtgtgaagagcctactgagctgggtagtagtcctccggcccctgaatgcggctaatcctaaccacggagcgtccaccggcaaaccggtcgggagggcgtcgtaacgggtaactctgtggcggaaccgactactttgggtgtccgtgtttccttttgatcctattttggctgcttatggtgacaacgataagttgttatcataaagcttttgggttggccacctggaaaaagttatcagtgtttgatattgttcggctctcacgccttccaacaaaacaggccttacttcttttaattgcattttatccatcggaggttattacagatttccatctgaagcttcttctcacagtagcagtaaa

SEQ ID NO: 24075 - DNA, 664 bp, synthetic construct
  source 1..664: mol_type = other DNA
ttagaaacaaacaatgaccaataggagtccagcatccagttggattgcggtcaagtacttctgtttccccggacctagtagtgataggctgtacccacggccgaagatgaacccgtccgttatccggctacctacttcgggaagcctagtaacattctgaagtctctgaggcgtttcgctcagcacgaccccggtgtagatcgggctgatgggtctccgcataccccacgggtgaccgtggcggaggccgcgttggcggcccgcctatggcgaaagccataggacgcctcttagatgacagggtgtgaagagcctactgagctgggtagtagtcctccggcccctgaatgcggctaatcctaaccacggagcgtccaccggcaaaccggtcgggagggcgtcgtaacgggtaactctgtggcggaaccgactactttgggtgtccgtgtttccttttgatcctattttggctgcttatggtgacaacgataagttgttatcataaagcttttgggttggccacctggaaaaagttatcagtgtttgatattgttcggctctcacgccttccaacaaaacaggccttacttcttttaattgcattttatccatcggaggttattacagatttccatctgaagcttcttctcacagtagcagtaaa

SEQ ID NO: 24076 - DNA, 614 bp, synthetic construct
  source 1..614: mol_type = other DNA
tcaagtacttctgtttccccggacctagtagtgataggctgtacccacggccgaagatgaacccgtccgttatccggctacctacttcgggaagcctagtaacattctgaagtctctgaggcgtttcgctcagcacgaccccggtgtagatcgggctgatgggtctccgcataccccacgggtgaccgtggcggaggccgcgttggcggcccgcctatggcgaaagccataggacgcctcttagatgacagggtgtgaagagcctactgagctgggtagtagtcctccggcccctgaatgcggctaatcctaaccacggagcgtccaccggcaaaccggtcgggagggcgtcgtaacgggtaactctgtggcggaaccgactactttgggtgtccgtgtttccttttgatcctattttggctgcttatggtgacaacgataagttgttatcataaagcttttgggttggccacctggaaaaagttatcagtgtttgatattgttcggctctcacgccttccaacaaaacaggccttacttcttttaattgcattttatccatcggaggttattacagatttccatctgaagcttcttctcacagtagcagtaaa

SEQ ID NO: 24077 - DNA, 564 bp, synthetic construct
  source 1..564: mol_type = other DNA
ccgaagatgaacccgtccgttatccggctacctacttcgggaagcctagtaacattctgaagtctctgaggcgtttcgctcagcacgaccccggtgtagatcgggctgatgggtctccgcataccccacgggtgaccgtggcggaggccgcgttggcggcccgcctatggcgaaagccataggacgcctcttagatgacagggtgtgaagagcctactgagctgggtagtagtcctccggcccctgaatgcggctaatcctaaccacggagcgtccaccggcaaaccggtcgggagggcgtcgtaacgggtaactctgtggcggaaccgactactttgggtgtccgtgtttccttttgatcctattttggctgcttatggtgacaacgataagttgttatcataaagcttttgggttggccacctggaaaaagttatcagtgtttgatattgttcggctctcacgccttccaacaaaacaggccttacttcttttaattgcattttatccatcggaggttattacagatttccatctgaagcttcttctcacagtagcagtaaa

SEQ ID NO: 24078 - DNA, 514 bp, synthetic construct
  source 1..514: mol_type = other DNA
aacattctgaagtctctgaggcgtttcgctcagcacgaccccggtgtagatcgggctgatgggtctccgcataccccacgggtgaccgtggcggaggccgcgttggcggcccgcctatggcgaaagccataggacgcctcttagatgacagggtgtgaagagcctactgagctgggtagtagtcctccggcccctgaatgcggctaatcctaaccacggagcgtccaccggcaaaccggtcgggagggcgtcgtaacgggtaactctgtggcggaaccgactactttgggtgtccgtgtttccttttgatcctattttggctgcttatggtgacaacgataagttgttatcataaagcttttgggttggccacctggaaaaagttatcagtgtttgatattgttcggctctcacgccttccaacaaaacaggccttacttcttttaattgcattttatccatcggaggttattacagatttccatctgaagcttcttctcacagtagcagtaaa

SEQ ID NO: 24079 - DNA, 764 bp, synthetic construct
  source 1..764: mol_type = other DNA
gactggtacgccagtaccttggtatcacggtaccactgtacgctagtacctttacacgcctgttttataccccttccccaaacgtaacattagaagtttaacaagcaaagaccaataggagtccaacacccagttggattgcggtcaagtacttctgtctccccggacctagtagtgataggctgtacccacggccgaagatgaaaccgtccgttatccggccagctacttcgagaagcctagtagcatcaaagatctgtcttggcgtttcgctcagcgcgttttcccccgcgtagatcgggctgatgggtctccgcataccccacgggcgaccgtggcggaggccgcgtggcggcccgcctatggcgaaagccataggacgccatttcagtgacagggtgtgaagagcctattgagctagttggtagtcctccggcccctgaatgcggctaatcctaaccacggagcgtttaccagcaaaccagctggcggaacgtcgtaacgggtaactctgtggcggaaccgactactttgggtgtccgtgtttcctgttgatcctattttggctgcttatggtgacaacgataagttgttatcataaagcttttgggttggccacctggaaaaaagttatcagtgtttgatattgttcggctttcacgcctaccattaagacaatcactttatttgttagttgcattttatcctgccaaggacattactgagtttcacctacaacttttactcatacaattacatcaagt

SEQ ID NO: 24080 - DNA, 714 bp, synthetic construct
  source 1..714: mol_type = other DNA
tttacacgcctgttttataccccttccccaaacgtaacattagaagtttaacaagcaaagaccaataggagtccaacacccagttggattgcggtcaagtacttctgtctccccggacctagtagtgataggctgtacccacggccgaagatgaaaccgtccgttatccggccagctacttcgagaagcctagtagcatcaaagatctgtcttggcgtttcgctcagcgcgttttcccccgcgtagatcgggctgatgggtctccgcataccccacgggcgaccgtggcggaggccgcgtggcggcccgcctatggcgaaagccataggacgccatttcagtgacagggtgtgaagagcctattgagctagttggtagtcctccggcccctgaatgcggctaatcctaaccacggagcgtttaccagcaaaccagctggcggaacgtcgtaacgggtaactctgtggcggaaccgactactttgggtgtccgtgtttcctgttgatcctattttggctgcttatggtgacaacgataagttgttatcataaagcttttgggttggccacctggaaaaaagttatcagtgtttgatattgttcggctttcacgcctaccattaagacaatcactttatttgttagttgcattttatcctgccaaggacattactgagtttcacctacaacttttactcatacaattacatcaagt

SEQ ID NO: 24081 - DNA, 664 bp, synthetic construct
  source 1..664: mol_type = other DNA
acaagcaaagaccaataggagtccaacacccagttggattgcggtcaagtacttctgtctccccggacctagtagtgataggctgtacccacggccgaagatgaaaccgtccgttatccggccagctacttcgagaagcctagtagcatcaaagatctgtcttggcgtttcgctcagcgcgttttcccccgcgtagatcgggctgatgggtctccgcataccccacgggcgaccgtggcggaggccgcgtggcggcccgcctatggcgaaagccataggacgccatttcagtgacagggtgtgaagagcctattgagctagttggtagtcctccggcccctgaatgcggctaatcctaaccacggagcgtttaccagcaaaccagctggcggaacgtcgtaacgggtaactctgtggcggaaccgactactttgggtgtccgtgtttcctgttgatcctattttggctgcttatggtgacaacgataagttgttatcataaagcttttgggttggccacctggaaaaaagttatcagtgtttgatattgttcggctttcacgcctaccattaagacaatcactttatttgttagttgcattttatcctgccaaggacattactgagtttcacctacaacttttactcatacaattacatcaagt

SEQ ID NO: 24082 - DNA, 614 bp, synthetic construct
  source 1..614: mol_type = other DNA
acttctgtctccccggacctagtagtgataggctgtacccacggccgaagatgaaaccgtccgttatccggccagctacttcgagaagcctagtagcatcaaagatctgtcttggcgtttcgctcagcgcgttttcccccgcgtagatcgggctgatgggtctccgcataccccacgggcgaccgtggcggaggccgcgtggcggcccgcctatggcgaaagccataggacgccatttcagtgacagggtgtgaagagcctattgagctagttggtagtcctccggcccctgaatgcggctaatcctaaccacggagcgtttaccagcaaaccagctggcggaacgtcgtaacgggtaactctgtggcggaaccgactactttgggtgtccgtgtttcctgttgatcctattttggctgcttatggtgacaacgataagttgttatcataaagcttttgggttggccacctggaaaaaagttatcagtgtttgatattgttcggctttcacgcctaccattaagacaatcactttatttgttagttgcattttatcctgccaaggacattactgagtttcacctacaacttttactcatacaattacatcaagt

SEQ ID NO: 24083 - DNA, 564 bp, synthetic construct
  source 1..564: mol_type = other DNA
atgaaaccgtccgttatccggccagctacttcgagaagcctagtagcatcaaagatctgtcttggcgtttcgctcagcgcgttttcccccgcgtagatcgggctgatgggtctccgcataccccacgggcgaccgtggcggaggccgcgtggcggcccgcctatggcgaaagccataggacgccatttcagtgacagggtgtgaagagcctattgagctagttggtagtcctccggcccctgaatgcggctaatcctaaccacggagcgtttaccagcaaaccagctggcggaacgtcgtaacgggtaactctgtggcggaaccgactactttgggtgtccgtgtttcctgttgatcctattttggctgcttatggtgacaacgataagttgttatcataaagcttttgggttggccacctggaaaaaagttatcagtgtttgatattgttcggctttcacgcctaccattaagacaatcactttatttgttagttgcattttatcctgccaaggacattactgagtttcacctacaacttttactcatacaattacatcaagt

SEQ ID NO: 24084 - DNA, 514 bp, synthetic construct
  source 1..514: mol_type = other DNA
aaagatctgtcttggcgtttcgctcagcgcgttttcccccgcgtagatcgggctgatgggtctccgcataccccacgggcgaccgtggcggaggccgcgtggcggcccgcctatggcgaaagccataggacgccatttcagtgacagggtgtgaagagcctattgagctagttggtagtcctccggcccctgaatgcggctaatcctaaccacggagcgtttaccagcaaaccagctggcggaacgtcgtaacgggtaactctgtggcggaaccgactactttgggtgtccgtgtttcctgttgatcctattttggctgcttatggtgacaacgataagttgttatcataaagcttttgggttggccacctggaaaaaagttatcagtgtttgatattgttcggctttcacgcctaccattaagacaatcactttatttgttagttgcattttatcctgccaaggacattactgagtttcacctacaacttttactcatacaattacatcaagt

SEQ ID NO: 24085 - DNA, 764 bp, synthetic construct
  source 1..764: mol_type = other DNA
cactctggtatgcttagtacctttgtgcgcctgttttcccctcccttaaacaaattaagattgccactactgaggggagtagtccgactccgctccggtacagccgcaccagtactccggtgcgcatagcaccctagtacggagtaggtggtatcccttcccgaaacttagaagttatgaaccaaaccgaccaataggagcgtggcatccagccatgttgtggtcaagcacttctgtttccccggtccgcaaggatcgttacccgcccgacccactacgagaagcctattaactggccaagcgattgcgaagttgcgctcagccacaatcccagtggtagctctggaagatggggctcgcactccccccgtggtaacacggttgcttgcccgcgtgtgcttccgggttcggtcaccgaccgttcacttcaatctcgcgtaaccagccaagagccgattgtgctgggacggttttcctccggggccgtgaatgctgctaatcctaacctccgagcgtgtgcgcacaaaccagtgttgctacgtcgtaacgcgtaagttggaggcggaacagactactttcggtaccccgtgtttcttttgatttattttgtattttaatggtgacactgactgacatttgtgagtttgctcgattgcctttgaatattgctctgtattatctaatagcatttcacaagactacccaactttcactcgagcttattgactttgctgtttacttgaaccgcatacacaaactcaaca

SEQ ID NO: 24086 - DNA, 714 bp, synthetic construct
  source 1..714: mol_type = other DNA
caaattaagattgccactactgaggggagtagtccgactccgctccggtacagccgcaccagtactccggtgcgcatagcaccctagtacggagtaggtggtatcccttcccgaaacttagaagttatgaaccaaaccgaccaataggagcgtggcatccagccatgttgtggtcaagcacttctgtttccccggtccgcaaggatcgttacccgcccgacccactacgagaagcctattaactggccaagcgattgcgaagttgcgctcagccacaatcccagtggtagctctggaagatggggctcgcactccccccgtggtaacacggttgcttgcccgcgtgtgcttccgggttcggtcaccgaccgttcacttcaatctcgcgtaaccagccaagagccgattgtgctgggacggttttcctccggggccgtgaatgctgctaatcctaacctccgagcgtgtgcgcacaaaccagtgttgctacgtcgtaacgcgtaagttggaggcggaacagactactttcggtaccccgtgtttcttttgatttattttgtattttaatggtgacactgactgacatttgtgagtttgctcgattgcctttgaatattgctctgtattatctaatagcatttcacaagactacccaactttcactcgagcttattgactttgctgtttacttgaaccgcatacacaaactcaaca

SEQ ID NO: 24087 - DNA, 664 bp, synthetic construct
  source 1..664: mol_type = other DNA
cagccgcaccagtactccggtgcgcatagcaccctagtacggagtaggtggtatcccttcccgaaacttagaagttatgaaccaaaccgaccaataggagcgtggcatccagccatgttgtggtcaagcacttctgtttccccggtccgcaaggatcgttacccgcccgacccactacgagaagcctattaactggccaagcgattgcgaagttgcgctcagccacaatcccagtggtagctctggaagatggggctcgcactccccccgtggtaacacggttgcttgcccgcgtgtgcttccgggttcggtcaccgaccgttcacttcaatctcgcgtaaccagccaagagccgattgtgctgggacggttttcctccggggccgtgaatgctgctaatcctaacctccgagcgtgtgcgcacaaaccagtgttgctacgtcgtaacgcgtaagttggaggcggaacagactactttcggtaccccgtgtttcttttgatttattttgtattttaatggtgacactgactgacatttgtgagtttgctcgattgcctttgaatattgctctgtattatctaatagcatttcacaagactacccaactttcactcgagcttattgactttgctgtttacttgaaccgcatacacaaactcaaca

SEQ ID NO: 24088 - DNA, 614 bp, synthetic construct
  source 1..614: mol_type = other DNA
gtatcccttcccgaaacttagaagttatgaaccaaaccgaccaataggagcgtggcatccagccatgttgtggtcaagcacttctgtttccccggtccgcaaggatcgttacccgcccgacccactacgagaagcctattaactggccaagcgattgcgaagttgcgctcagccacaatcccagtggtagctctggaagatggggctcgcactccccccgtggtaacacggttgcttgcccgcgtgtgcttccgggttcggtcaccgaccgttcacttcaatctcgcgtaaccagccaagagccgattgtgctgggacggttttcctccggggccgtgaatgctgctaatcctaacctccgagcgtgtgcgcacaaaccagtgttgctacgtcgtaacgcgtaagttggaggcggaacagactactttcggtaccccgtgtttcttttgatttattttgtattttaatggtgacactgactgacatttgtgagtttgctcgattgcctttgaatattgctctgtattatctaatagcatttcacaagactacccaactttcactcgagcttattgactttgctgtttacttgaaccgcatacacaaactcaaca

SEQ ID NO: 24089 - DNA, 564 bp, synthetic construct
  source 1..564: mol_type = other DNA
cgtggcatccagccatgttgtggtcaagcacttctgtttccccggtccgcaaggatcgttacccgcccgacccactacgagaagcctattaactggccaagcgattgcgaagttgcgctcagccacaatcccagtggtagctctggaagatggggctcgcactccccccgtggtaacacggttgcttgcccgcgtgtgcttccgggttcggtcaccgaccgttcacttcaatctcgcgtaaccagccaagagccgattgtgctgggacggttttcctccggggccgtgaatgctgctaatcctaacctccgagcgtgtgcgcacaaaccagtgttgctacgtcgtaacgcgtaagttggaggcggaacagactactttcggtaccccgtgtttcttttgatttattttgtattttaatggtgacactgactgacatttgtgagtttgctcgattgcctttgaatattgctctgtattatctaatagcatttcacaagactacccaactttcactcgagcttattgactttgctgtttacttgaaccgcatacacaaactcaaca

SEQ ID NO: 24090 - DNA, 514 bp, synthetic construct
  source 1..514: mol_type = other DNA
aaggatcgttacccgcccgacccactacgagaagcctattaactggccaagcgattgcgaagttgcgctcagccacaatcccagtggtagctctggaagatggggctcgcactccccccgtggtaacacggttgcttgcccgcgtgtgcttccgggttcggtcaccgaccgttcacttcaatctcgcgtaaccagccaagagccgattgtgctgggacggttttcctccggggccgtgaatgctgctaatcctaacctccgagcgtgtgcgcacaaaccagtgttgctacgtcgtaacgcgtaagttggaggcggaacagactactttcggtaccccgtgtttcttttgatttattttgtattttaatggtgacactgactgacatttgtgagtttgctcgattgcctttgaatattgctctgtattatctaatagcatttcacaagactacccaactttcactcgagcttattgactttgctgtttacttgaaccgcatacacaaactcaaca

SEQ ID NO: 24091 - DNA, 765 bp, synthetic construct
  source 1..765: mol_type = other DNA
ctctggtgcgttagtacctttgcacgcctgttttcccttcccttaaacaaattaagatcgccagcgccgaggggagtagtccgactccgctccactacggtgctccagtggattgctattacggtagctcttcacggggtggctggtgtccccaaccccgcaacttagaagccagcacagatcgaccaatagcggctcggcagccagtcgggcaacggtcaagcacttctgtttccccggtccgtaaggatcgttacccgcccaggatgctacgagaaacttagtaaacacccaagcttgtgagaggttgcgctcagccacaaccccagtggtagctctgagtgatggggctcgtgactacccctctggtaacagagacacttgcccgcgtgtgcactcgggttcatcagaaatggtgttcacctcgaccaagcgtaagtgttgaagagtctattgtgccagcctggtttcctccggggccgtgaatgctgctaatcctaacctccgagcgtgtgcgcacaatccagtgttgctacgtcgtaacgcgtaagttggaggcggaacagactactttcggtaccccgtgtttcctcattcattatttcaatttatggtgacaattacagagatttgtgaattggcgaaactaccactgaatttggccttgtattgtcttattgccttccacaaaacttctgatattccacccagttatatcgatctcctggtttatctaaatttacaatataaattgaaccagataca

SEQ ID NO: 24092 - DNA, 715 bp, synthetic construct
  source 1..715: mol_type = other DNA
attaagatcgccagcgccgaggggagtagtccgactccgctccactacggtgctccagtggattgctattacggtagctcttcacggggtggctggtgtccccaaccccgcaacttagaagccagcacagatcgaccaatagcggctcggcagccagtcgggcaacggtcaagcacttctgtttccccggtccgtaaggatcgttacccgcccaggatgctacgagaaacttagtaaacacccaagcttgtgagaggttgcgctcagccacaaccccagtggtagctctgagtgatggggctcgtgactacccctctggtaacagagacacttgcccgcgtgtgcactcgggttcatcagaaatggtgttcacctcgaccaagcgtaagtgttgaagagtctattgtgccagcctggtttcctccggggccgtgaatgctgctaatcctaacctccgagcgtgtgcgcacaatccagtgttgctacgtcgtaacgcgtaagttggaggcggaacagactactttcggtaccccgtgtttcctcattcattatttcaatttatggtgacaattacagagatttgtgaattggcgaaactaccactgaatttggccttgtattgtcttattgccttccacaaaacttctgatattccacccagttatatcgatctcctggtttatctaaatttacaatataaattgaaccagataca

SEQ ID NO: 24093 - DNA, 665 bp, synthetic construct
  source 1..665: mol_type = other DNA
tgctccagtggattgctattacggtagctcttcacggggtggctggtgtccccaaccccgcaacttagaagccagcacagatcgaccaatagcggctcggcagccagtcgggcaacggtcaagcacttctgtttccccggtccgtaaggatcgttacccgcccaggatgctacgagaaacttagtaaacacccaagcttgtgagaggttgcgctcagccacaaccccagtggtagctctgagtgatggggctcgtgactacccctctggtaacagagacacttgcccgcgtgtgcactcgggttcatcagaaatggtgttcacctcgaccaagcgtaagtgttgaagagtctattgtgccagcctggtttcctccggggccgtgaatgctgctaatcctaacctccgagcgtgtgcgcacaatccagtgttgctacgtcgtaacgcgtaagttggaggcggaacagactactttcggtaccccgtgtttcctcattcattatttcaatttatggtgacaattacagagatttgtgaattggcgaaactaccactgaatttggccttgtattgtcttattgccttccacaaaacttctgatattccacccagttatatcgatctcctggtttatctaaatttacaatataaattgaaccagataca

SEQ ID NO: 24094 - DNA, 615 bp, synthetic construct
  source 1..615: mol_type = other DNA
cccaaccccgcaacttagaagccagcacagatcgaccaatagcggctcggcagccagtcgggcaacggtcaagcacttctgtttccccggtccgtaaggatcgttacccgcccaggatgctacgagaaacttagtaaacacccaagcttgtgagaggttgcgctcagccacaaccccagtggtagctctgagtgatggggctcgtgactacccctctggtaacagagacacttgcccgcgtgtgcactcgggttcatcagaaatggtgttcacctcgaccaagcgtaagtgttgaagagtctattgtgccagcctggtttcctccggggccgtgaatgctgctaatcctaacctccgagcgtgtgcgcacaatccagtgttgctacgtcgtaacgcgtaagttggaggcggaacagactactttcggtaccccgtgtttcctcattcattatttcaatttatggtgacaattacagagatttgtgaattggcgaaactaccactgaatttggccttgtattgtcttattgccttccacaaaacttctgatattccacccagttatatcgatctcctggtttatctaaatttacaatataaattgaaccagataca

SEQ ID NO: 24095 - DNA, 565 bp, synthetic construct
  source 1..565: mol_type = other DNA
cagccagtcgggcaacggtcaagcacttctgtttccccggtccgtaaggatcgttacccgcccaggatgctacgagaaacttagtaaacacccaagcttgtgagaggttgcgctcagccacaaccccagtggtagctctgagtgatggggctcgtgactacccctctggtaacagagacacttgcccgcgtgtgcactcgggttcatcagaaatggtgttcacctcgaccaagcgtaagtgttgaagagtctattgtgccagcctggtttcctccggggccgtgaatgctgctaatcctaacctccgagcgtgtgcgcacaatccagtgttgctacgtcgtaacgcgtaagttggaggcggaacagactactttcggtaccccgtgtttcctcattcattatttcaatttatggtgacaattacagagatttgtgaattggcgaaactaccactgaatttggccttgtattgtcttattgccttccacaaaacttctgatattccacccagttatatcgatctcctggtttatctaaatttacaatataaattgaaccagataca

SEQ ID NO: 24096 - DNA, 515 bp, synthetic construct
  source 1..515: mol_type = other DNA
tcgttacccgcccaggatgctacgagaaacttagtaaacacccaagcttgtgagaggttgcgctcagccacaaccccagtggtagctctgagtgatggggctcgtgactacccctctggtaacagagacacttgcccgcgtgtgcactcgggttcatcagaaatggtgttcacctcgaccaagcgtaagtgttgaagagtctattgtgccagcctggtttcctccggggccgtgaatgctgctaatcctaacctccgagcgtgtgcgcacaatccagtgttgctacgtcgtaacgcgtaagttggaggcggaacagactactttcggtaccccgtgtttcctcattcattatttcaatttatggtgacaattacagagatttgtgaattggcgaaactaccactgaatttggccttgtattgtcttattgccttccacaaaacttctgatattccacccagttatatcgatctcctggtttatctaaatttacaatataaattgaaccagataca

SEQ ID NO: 24097 - DNA, 766 bp, synthetic construct
  source 1..766: mol_type = other DNA
tactctggtacgtcagcacccttgtacccccgtttttccctcccttaaacaaattaagattaccactactgaggggagtagtccgactccgctccggtactgccgcaccagtactccggtacgtttagtactctagtacggagtagatggtatcccccacccttgcaacttagaaggaatcaaactacccgaccaataggcgcgcggcatccagccgcgttacggtcaagcacttctgtttccccggtccgcaagggtcgttatccgcccgctccactacgaaaagcctagtagccaaccaaacgactgcgaagttgcgttcagccacaaccccagtggtagctctggaagatggggctcgcaatacccccgtggtgacacggttgcttgcccgcgcgtgcttccgggttcggtcatgtaccgttcactttaatgtcgtgtaattggtcaagagcctattgtgctggagcggttttcctccggggccgtgaatgctgctaatcccaacctctgagcgtgtgcgcacaaaccagtgttgctacgtcgtaacgcgtaagtcggaggcggaacagactactttcggtaccccgtgtttcacttatttttactttatattttatggtgacacttgctgatatttgtgaatttgctcgcttgccgttgaacatagccttgtattatttagtagcattttacaacacaagccagctttcagttgaactcattgattttgctgtttacctcaattacatacacaaacacaaca

SEQ ID NO: 24098 - DNA, 716 bp, synthetic construct
  source 1..716: mol_type = other DNA
aaattaagattaccactactgaggggagtagtccgactccgctccggtactgccgcaccagtactccggtacgtttagtactctagtacggagtagatggtatcccccacccttgcaacttagaaggaatcaaactacccgaccaataggcgcgcggcatccagccgcgttacggtcaagcacttctgtttccccggtccgcaagggtcgttatccgcccgctccactacgaaaagcctagtagccaaccaaacgactgcgaagttgcgttcagccacaaccccagtggtagctctggaagatggggctcgcaatacccccgtggtgacacggttgcttgcccgcgcgtgcttccgggttcggtcatgtaccgttcactttaatgtcgtgtaattggtcaagagcctattgtgctggagcggttttcctccggggccgtgaatgctgctaatcccaacctctgagcgtgtgcgcacaaaccagtgttgctacgtcgtaacgcgtaagtcggaggcggaacagactactttcggtaccccgtgtttcacttatttttactttatattttatggtgacacttgctgatatttgtgaatttgctcgcttgccgttgaacatagccttgtattatttagtagcattttacaacacaagccagctttcagttgaactcattgattttgctgtttacctcaattacatacacaaacacaaca

SEQ ID NO: 24099 - DNA, 666 bp, synthetic construct
  source 1..666: mol_type = other DNA
tgccgcaccagtactccggtacgtttagtactctagtacggagtagatggtatcccccacccttgcaacttagaaggaatcaaactacccgaccaataggcgcgcggcatccagccgcgttacggtcaagcacttctgtttccccggtccgcaagggtcgttatccgcccgctccactacgaaaagcctagtagccaaccaaacgactgcgaagttgcgttcagccacaaccccagtggtagctctggaagatggggctcgcaatacccccgtggtgacacggttgcttgcccgcgcgtgcttccgggttcggtcatgtaccgttcactttaatgtcgtgtaattggtcaagagcctattgtgctggagcggttttcctccggggccgtgaatgctgctaatcccaacctctgagcgtgtgcgcacaaaccagtgttgctacgtcgtaacgcgtaagtcggaggcggaacagactactttcggtaccccgtgtttcacttatttttactttatattttatggtgacacttgctgatatttgtgaatttgctcgcttgccgttgaacatagccttgtattatttagtagcattttacaacacaagccagctttcagttgaactcattgattttgctgtttacctcaattacatacacaaacacaaca

SEQ ID NO: 24100 - DNA, 616 bp, synthetic construct
  source 1..616: mol_type = other DNA
tatcccccacccttgcaacttagaaggaatcaaactacccgaccaataggcgcgcggcatccagccgcgttacggtcaagcacttctgtttccccggtccgcaagggtcgttatccgcccgctccactacgaaaagcctagtagccaaccaaacgactgcgaagttgcgttcagccacaaccccagtggtagctctggaagatggggctcgcaatacccccgtggtgacacggttgcttgcccgcgcgtgcttccgggttcggtcatgtaccgttcactttaatgtcgtgtaattggtcaagagcctattgtgctggagcggttttcctccggggccgtgaatgctgctaatcccaacctctgagcgtgtgcgcacaaaccagtgttgctacgtcgtaacgcgtaagtcggaggcggaacagactactttcggtaccccgtgtttcacttatttttactttatattttatggtgacacttgctgatatttgtgaatttgctcgcttgccgttgaacatagccttgtattatttagtagcattttacaacacaagccagctttcagttgaactcattgattttgctgtttacctcaattacatacacaaacacaaca

SEQ ID NO: 24101 - DNA, 566 bp, synthetic construct
  source 1..566: mol_type = other DNA
cgcgcggcatccagccgcgttacggtcaagcacttctgtttccccggtccgcaagggtcgttatccgcccgctccactacgaaaagcctagtagccaaccaaacgactgcgaagttgcgttcagccacaaccccagtggtagctctggaagatggggctcgcaatacccccgtggtgacacggttgcttgcccgcgcgtgcttccgggttcggtcatgtaccgttcactttaatgtcgtgtaattggtcaagagcctattgtgctggagcggttttcctccggggccgtgaatgctgctaatcccaacctctgagcgtgtgcgcacaaaccagtgttgctacgtcgtaacgcgtaagtcggaggcggaacagactactttcggtaccccgtgtttcacttatttttactttatattttatggtgacacttgctgatatttgtgaatttgctcgcttgccgttgaacatagccttgtattatttagtagcattttacaacacaagccagctttcagttgaactcattgattttgctgtttacctcaattacatacacaaacacaaca

SEQ ID NO: 24102 - DNA, 516 bp, synthetic construct
  source 1..516: mol_type = other DNA
gcaagggtcgttatccgcccgctccactacgaaaagcctagtagccaaccaaacgactgcgaagttgcgttcagccacaaccccagtggtagctctggaagatggggctcgcaatacccccgtggtgacacggttgcttgcccgcgcgtgcttccgggttcggtcatgtaccgttcactttaatgtcgtgtaattggtcaagagcctattgtgctggagcggttttcctccggggccgtgaatgctgctaatcccaacctctgagcgtgtgcgcacaaaccagtgttgctacgtcgtaacgcgtaagtcggaggcggaacagactactttcggtaccccgtgtttcacttatttttactttatattttatggtgacacttgctgatatttgtgaatttgctcgcttgccgttgaacatagccttgtattatttagtagcattttacaacacaagccagctttcagttgaactcattgattttgctgtttacctcaattacatacacaaacacaaca

SEQ ID NO: 24103 - DNA, 766 bp, synthetic construct
  source 1..766: mol_type = other DNA
cactctggtacgctagtacctttgtacgcctgttttccccacccttaaataaattaagattaccactaccgaggggagtagtccgactccgctccggcacagccgcaccagtgcactggtacgctagtaccttttcacggggtagtcggtatccccccccgtaacttagaagcatgtaacaaaccgaccaataggtgcgcggcagccagctgcgttgcggtcaagcacttctgtctccccggtccgcaaggatcgttacccgcccactccactacgaggagcctagtaactggccaagtgattgcggagttgcgttcagccacaaccccagtggtagctctggaagatggggctcgcacatcccccgtggtaacacggttgcttgcccgcgtgtgcttccgggttcagtctccgactgttcacttcaacatcacgcaaccagccaagagccgattgtgctggagtggtcttcctccggggccgtgaatgctgctaatcctaacctccgagcgtgtgcgcacaatccagtgttgctacgtcgtaacgcgtaagttggaggcggaacagactactttcggcaccccgtgtttcctttattttattcttattttatggtgacaattgcagagatttgtgatattgcgactttaccgttaaacatagcactgcattacctggttgcattccacaaaacttcagagattcctagttcctacattgacctacttgtttatttgaatcttaaatacaaacttgagcaagtgaa

SEQ ID NO: 24104 - DNA, 716 bp, synthetic construct
  source 1..716: mol_type = other DNA
aaattaagattaccactaccgaggggagtagtccgactccgctccggcacagccgcaccagtgcactggtacgctagtaccttttcacggggtagtcggtatccccccccgtaacttagaagcatgtaacaaaccgaccaataggtgcgcggcagccagctgcgttgcggtcaagcacttctgtctccccggtccgcaaggatcgttacccgcccactccactacgaggagcctagtaactggccaagtgattgcggagttgcgttcagccacaaccccagtggtagctctggaagatggggctcgcacatcccccgtggtaacacggttgcttgcccgcgtgtgcttccgggttcagtctccgactgttcacttcaacatcacgcaaccagccaagagccgattgtgctggagtggtcttcctccggggccgtgaatgctgctaatcctaacctccgagcgtgtgcgcacaatccagtgttgctacgtcgtaacgcgtaagttggaggcggaacagactactttcggcaccccgtgtttcctttattttattcttattttatggtgacaattgcagagatttgtgatattgcgactttaccgttaaacatagcactgcattacctggttgcattccacaaaacttcagagattcctagttcctacattgacctacttgtttatttgaatcttaaatacaaacttgagcaagtgaa

SEQ ID NO: 24105 - DNA, 666 bp, synthetic construct
  source 1..666: mol_type = other DNA
agccgcaccagtgcactggtacgctagtaccttttcacggggtagtcggtatccccccccgtaacttagaagcatgtaacaaaccgaccaataggtgcgcggcagccagctgcgttgcggtcaagcacttctgtctccccggtccgcaaggatcgttacccgcccactccactacgaggagcctagtaactggccaagtgattgcggagttgcgttcagccacaaccccagtggtagctctggaagatggggctcgcacatcccccgtggtaacacggttgcttgcccgcgtgtgcttccgggttcagtctccgactgttcacttcaacatcacgcaaccagccaagagccgattgtgctggagtggtcttcctccggggccgtgaatgctgctaatcctaacctccgagcgtgtgcgcacaatccagtgttgctacgtcgtaacgcgtaagttggaggcggaacagactactttcggcaccccgtgtttcctttattttattcttattttatggtgacaattgcagagatttgtgatattgcgactttaccgttaaacatagcactgcattacctggttgcattccacaaaacttcagagattcctagttcctacattgacctacttgtttatttgaatcttaaatacaaacttgagcaagtgaa

SEQ ID NO: 24106 - DNA, 616 bp, synthetic construct
  source 1..616: mol_type = other DNA
atccccccccgtaacttagaagcatgtaacaaaccgaccaataggtgcgcggcagccagctgcgttgcggtcaagcacttctgtctccccggtccgcaaggatcgttacccgcccactccactacgaggagcctagtaactggccaagtgattgcggagttgcgttcagccacaaccccagtggtagctctggaagatggggctcgcacatcccccgtggtaacacggttgcttgcccgcgtgtgcttccgggttcagtctccgactgttcacttcaacatcacgcaaccagccaagagccgattgtgctggagtggtcttcctccggggccgtgaatgctgctaatcctaacctccgagcgtgtgcgcacaatccagtgttgctacgtcgtaacgcgtaagttggaggcggaacagactactttcggcaccccgtgtttcctttattttattcttattttatggtgacaattgcagagatttgtgatattgcgactttaccgttaaacatagcactgcattacctggttgcattccacaaaacttcagagattcctagttcctacattgacctacttgtttatttgaatcttaaatacaaacttgagcaagtgaa

SEQ ID NO: 24107 - DNA, 566 bp, synthetic construct
  source 1..566: mol_type = other DNA
ggcagccagctgcgttgcggtcaagcacttctgtctccccggtccgcaaggatcgttacccgcccactccactacgaggagcctagtaactggccaagtgattgcggagttgcgttcagccacaaccccagtggtagctctggaagatggggctcgcacatcccccgtggtaacacggttgcttgcccgcgtgtgcttccgggttcagtctccgactgttcacttcaacatcacgcaaccagccaagagccgattgtgctggagtggtcttcctccggggccgtgaatgctgctaatcctaacctccgagcgtgtgcgcacaatccagtgttgctacgtcgtaacgcgtaagttggaggcggaacagactactttcggcaccccgtgtttcctttattttattcttattttatggtgacaattgcagagatttgtgatattgcgactttaccgttaaacatagcactgcattacctggttgcattccacaaaacttcagagattcctagttcctacattgacctacttgtttatttgaatcttaaatacaaacttgagcaagtgaa

SEQ ID NO: 24108 - DNA, 516 bp, synthetic construct
  source 1..516: mol_type = other DNA
gatcgttacccgcccactccactacgaggagcctagtaactggccaagtgattgcggagttgcgttcagccacaaccccagtggtagctctggaagatggggctcgcacatcccccgtggtaacacggttgcttgcccgcgtgtgcttccgggttcagtctccgactgttcacttcaacatcacgcaaccagccaagagccgattgtgctggagtggtcttcctccggggccgtgaatgctgctaatcctaacctccgagcgtgtgcgcacaatccagtgttgctacgtcgtaacgcgtaagttggaggcggaacagactactttcggcaccccgtgtttcctttattttattcttattttatggtgacaattgcagagatttgtgatattgcgactttaccgttaaacatagcactgcattacctggttgcattccacaaaacttcagagattcctagttcctacattgacctacttgtttatttgaatcttaaatacaaacttgagcaagtgaa

SEQ ID NO: 24109 - DNA, 766 bp, synthetic construct
  source 1..766: mol_type = other DNA
tactctggtacgctagtacctttgtacgcctgttttcccctcccttaaacaaattaagattgccactactgaggggagtagtccgactccgctccgacactgtcgcaccagtactccggtacgcttagtaccctagtacggagtaggtggcatccccaccccgaaacttagaagtatgcaaacaaaccgaccaataggcgcgcggtatccagccgtgtgaaggtcaagcacttctgtctccccggtccgtaaggatcgttacccgcccgacctactacgaaaagcctagtagttggccaagcgagcacgaggttgcactcaaccacaaccccagtggtagctctggaagatggggctcgcagttcccccgtggcaacacggttgcttgcccgcgtgcgcttccgggttcggacttgtgccgttcacctcaaactcgcgtaaccagcgaagagccgattgtgctaggacggttttcctccggggccgtgaatgctgctaatcccaacctccgagcgtgtgcgcacattccagtgttgctacgtcgtaatgcgtaagtcggaggcggaacagactactttcggtaccccgtgtttcctcttattttatttacattttatggtgacactgactgacattcgtgagctagcccgcttgcctctcaatattgcactttattatttggtagcattttacaatactctcgaacttacccttgagcttgttgatttcatcgtttacctaaatcggcttgacaaaggatacaata

SEQ ID NO: 24110 - DNA, 716 bp, synthetic construct
  source 1..716: mol_type = other DNA
aaattaagattgccactactgaggggagtagtccgactccgctccgacactgtcgcaccagtactccggtacgcttagtaccctagtacggagtaggtggcatccccaccccgaaacttagaagtatgcaaacaaaccgaccaataggcgcgcggtatccagccgtgtgaaggtcaagcacttctgtctccccggtccgtaaggatcgttacccgcccgacctactacgaaaagcctagtagttggccaagcgagcacgaggttgcactcaaccacaaccccagtggtagctctggaagatggggctcgcagttcccccgtggcaacacggttgcttgcccgcgtgcgcttccgggttcggacttgtgccgttcacctcaaactcgcgtaaccagcgaagagccgattgtgctaggacggttttcctccggggccgtgaatgctgctaatcccaacctccgagcgtgtgcgcacattccagtgttgctacgtcgtaatgcgtaagtcggaggcggaacagactactttcggtaccccgtgtttcctcttattttatttacattttatggtgacactgactgacattcgtgagctagcccgcttgcctctcaatattgcactttattatttggtagcattttacaatactctcgaacttacccttgagcttgttgatttcatcgtttacctaaatcggcttgacaaaggatacaata

SEQ ID NO: 24111 - DNA, 666 bp, synthetic construct
  source 1..666: mol_type = other DNA
tgtcgcaccagtactccggtacgcttagtaccctagtacggagtaggtggcatccccaccccgaaacttagaagtatgcaaacaaaccgaccaataggcgcgcggtatccagccgtgtgaaggtcaagcacttctgtctccccggtccgtaaggatcgttacccgcccgacctactacgaaaagcctagtagttggccaagcgagcacgaggttgcactcaaccacaaccccagtggtagctctggaagatggggctcgcagttcccccgtggcaacacggttgcttgcccgcgtgcgcttccgggttcggacttgtgccgttcacctcaaactcgcgtaaccagcgaagagccgattgtgctaggacggttttcctccggggccgtgaatgctgctaatcccaacctccgagcgtgtgcgcacattccagtgttgctacgtcgtaatgcgtaagtcggaggcggaacagactactttcggtaccccgtgtttcctcttattttatttacattttatggtgacactgactgacattcgtgagctagcccgcttgcctctcaatattgcactttattatttggtagcattttacaatactctcgaacttacccttgagcttgttgatttcatcgtttacctaaatcggcttgacaaaggatacaata

SEQ ID NO: 24112 - DNA, 616 bp, synthetic construct
  source 1..616: mol_type = other DNA
catccccaccccgaaacttagaagtatgcaaacaaaccgaccaataggcgcgcggtatccagccgtgtgaaggtcaagcacttctgtctccccggtccgtaaggatcgttacccgcccgacctactacgaaaagcctagtagttggccaagcgagcacgaggttgcactcaaccacaaccccagtggtagctctggaagatggggctcgcagttcccccgtggcaacacggttgcttgcccgcgtgcgcttccgggttcggacttgtgccgttcacctcaaactcgcgtaaccagcgaagagccgattgtgctaggacggttttcctccggggccgtgaatgctgctaatcccaacctccgagcgtgtgcgcacattccagtgttgctacgtcgtaatgcgtaagtcggaggcggaacagactactttcggtaccccgtgtttcctcttattttatttacattttatggtgacactgactgacattcgtgagctagcccgcttgcctctcaatattgcactttattatttggtagcattttacaatactctcgaacttacccttgagcttgttgatttcatcgtttacctaaatcggcttgacaaaggatacaata

SEQ ID NO: 24113 - DNA, 566 bp, synthetic construct
  source 1..566: mol_type = other DNA
cgcggtatccagccgtgtgaaggtcaagcacttctgtctccccggtccgtaaggatcgttacccgcccgacctactacgaaaagcctagtagttggccaagcgagcacgaggttgcactcaaccacaaccccagtggtagctctggaagatggggctcgcagttcccccgtggcaacacggttgcttgcccgcgtgcgcttccgggttcggacttgtgccgttcacctcaaactcgcgtaaccagcgaagagccgattgtgctaggacggttttcctccggggccgtgaatgctgctaatcccaacctccgagcgtgtgcgcacattccagtgttgctacgtcgtaatgcgtaagtcggaggcggaacagactactttcggtaccccgtgtttcctcttattttatttacattttatggtgacactgactgacattcgtgagctagcccgcttgcctctcaatattgcactttattatttggtagcattttacaatactctcgaacttacccttgagcttgttgatttcatcgtttacctaaatcggcttgacaaaggatacaata

SEQ ID NO: 24114 - DNA, 516 bp, synthetic construct
  source 1..516: mol_type = other DNA
aaggatcgttacccgcccgacctactacgaaaagcctagtagttggccaagcgagcacgaggttgcactcaaccacaaccccagtggtagctctggaagatggggctcgcagttcccccgtggcaacacggttgcttgcccgcgtgcgcttccgggttcggacttgtgccgttcacctcaaactcgcgtaaccagcgaagagccgattgtgctaggacggttttcctccggggccgtgaatgctgctaatcccaacctccgagcgtgtgcgcacattccagtgttgctacgtcgtaatgcgtaagtcggaggcggaacagactactttcggtaccccgtgtttcctcttattttatttacattttatggtgacactgactgacattcgtgagctagcccgcttgcctctcaatattgcactttattatttggtagcattttacaatactctcgaacttacccttgagcttgttgatttcatcgtttacctaaatcggcttgacaaaggatacaata

SEQ ID NO: 24115 - DNA, 767 bp, synthetic construct
  source 1..767: mol_type = other DNA
tactctggtacgttagtacctttgtacgcctgttttcccctcccttaaataaattaagattgccactactgaggggagtagtccgactccgctccggcactgccgcaccagtactccggtacgcctagtaccctagtacggagtagatggtatcccccccccgaaacttagaagtaatgagtctaaccgaccaataggcgcgcggcatccagccgtgttacggtcaagcacttctgtttccccggtccgcaaggatcgttacccgcccgacccactacgagaagcctattaactggccaagcgtcagtgaagttgcactcagccacaaccccagtggtagctctggaagatggggctcgcatctcccccgtggtaacacggttgcttgcccgcgcgtgcttccgggttcagcctcgcgctgttcacttcaatgacacgtaaccagccaagagccgattgtgctgggacggttttcctccggggccgtgaatgctgctaatcctaacctccgagcgtgtgcgcacaatccagtgttgctacgtcgtaacgcgtaagttggaggcggaacagactactttcggtaccccgtgtttcccttaaatttttccttaaatatatggtgacattgactgacatttgtgagtttgctcgcttgccaatcaacattgcactctattacctaatagcatttcacaatacttgtgaactcacccttgaacttgtcaatttctccgcctatttgaactacttaaatagaaagtataaca

SEQ ID NO: 24116 - DNA, 717 bp, synthetic construct
  source 1..717: mol_type = other DNA
aaattaagattgccactactgaggggagtagtccgactccgctccggcactgccgcaccagtactccggtacgcctagtaccctagtacggagtagatggtatcccccccccgaaacttagaagtaatgagtctaaccgaccaataggcgcgcggcatccagccgtgttacggtcaagcacttctgtttccccggtccgcaaggatcgttacccgcccgacccactacgagaagcctattaactggccaagcgtcagtgaagttgcactcagccacaaccccagtggtagctctggaagatggggctcgcatctcccccgtggtaacacggttgcttgcccgcgcgtgcttccgggttcagcctcgcgctgttcacttcaatgacacgtaaccagccaagagccgattgtgctgggacggttttcctccggggccgtgaatgctgctaatcctaacctccgagcgtgtgcgcacaatccagtgttgctacgtcgtaacgcgtaagttggaggcggaacagactactttcggtaccccgtgtttcccttaaatttttccttaaatatatggtgacattgactgacatttgtgagtttgctcgcttgccaatcaacattgcactctattacctaatagcatttcacaatacttgtgaactcacccttgaacttgtcaatttctccgcctatttgaactacttaaatagaaagtataaca

SEQ ID NO: 24117 - DNA, 667 bp, synthetic construct
  source 1..667: mol_type = other DNA
tgccgcaccagtactccggtacgcctagtaccctagtacggagtagatggtatcccccccccgaaacttagaagtaatgagtctaaccgaccaataggcgcgcggcatccagccgtgttacggtcaagcacttctgtttccccggtccgcaaggatcgttacccgcccgacccactacgagaagcctattaactggccaagcgtcagtgaagttgcactcagccacaaccccagtggtagctctggaagatggggctcgcatctcccccgtggtaacacggttgcttgcccgcgcgtgcttccgggttcagcctcgcgctgttcacttcaatgacacgtaaccagccaagagccgattgtgctgggacggttttcctccggggccgtgaatgctgctaatcctaacctccgagcgtgtgcgcacaatccagtgttgctacgtcgtaacgcgtaagttggaggcggaacagactactttcggtaccccgtgtttcccttaaatttttccttaaatatatggtgacattgactgacatttgtgagtttgctcgcttgccaatcaacattgcactctattacctaatagcatttcacaatacttgtgaactcacccttgaacttgtcaatttctccgcctatttgaactacttaaatagaaagtataaca

SEQ ID NO: 24118 - DNA, 617 bp, synthetic construct
  source 1..617: mol_type = other DNA
tatcccccccccgaaacttagaagtaatgagtctaaccgaccaataggcgcgcggcatccagccgtgttacggtcaagcacttctgtttccccggtccgcaaggatcgttacccgcccgacccactacgagaagcctattaactggccaagcgtcagtgaagttgcactcagccacaaccccagtggtagctctggaagatggggctcgcatctcccccgtggtaacacggttgcttgcccgcgcgtgcttccgggttcagcctcgcgctgttcacttcaatgacacgtaaccagccaagagccgattgtgctgggacggttttcctccggggccgtgaatgctgctaatcctaacctccgagcgtgtgcgcacaatccagtgttgctacgtcgtaacgcgtaagttggaggcggaacagactactttcggtaccccgtgtttcccttaaatttttccttaaatatatggtgacattgactgacatttgtgagtttgctcgcttgccaatcaacattgcactctattacctaatagcatttcacaatacttgtgaactcacccttgaacttgtcaatttctccgcctatttgaactacttaaatagaaagtataaca

SEQ ID NO: 24119 - DNA, 567 bp, synthetic construct
  source 1..567: mol_type = other DNA
cgcggcatccagccgtgttacggtcaagcacttctgtttccccggtccgcaaggatcgttacccgcccgacccactacgagaagcctattaactggccaagcgtcagtgaagttgcactcagccacaaccccagtggtagctctggaagatggggctcgcatctcccccgtggtaacacggttgcttgcccgcgcgtgcttccgggttcagcctcgcgctgttcacttcaatgacacgtaaccagccaagagccgattgtgctgggacggttttcctccggggccgtgaatgctgctaatcctaacctccgagcgtgtgcgcacaatccagtgttgctacgtcgtaacgcgtaagttggaggcggaacagactactttcggtaccccgtgtttcccttaaatttttccttaaatatatggtgacattgactgacatttgtgagtttgctcgcttgccaatcaacattgcactctattacctaatagcatttcacaatacttgtgaactcacccttgaacttgtcaatttctccgcctatttgaactacttaaatagaaagtataaca

SEQ ID NO: 24120 - DNA, 517 bp, synthetic construct
  source 1..517: mol_type = other DNA
aaggatcgttacccgcccgacccactacgagaagcctattaactggccaagcgtcagtgaagttgcactcagccacaaccccagtggtagctctggaagatggggctcgcatctcccccgtggtaacacggttgcttgcccgcgcgtgcttccgggttcagcctcgcgctgttcacttcaatgacacgtaaccagccaagagccgattgtgctgggacggttttcctccggggccgtgaatgctgctaatcctaacctccgagcgtgtgcgcacaatccagtgttgctacgtcgtaacgcgtaagttggaggcggaacagactactttcggtaccccgtgtttcccttaaatttttccttaaatatatggtgacattgactgacatttgtgagtttgctcgcttgccaatcaacattgcactctattacctaatagcatttcacaatacttgtgaactcacccttgaacttgtcaatttctccgcctatttgaactacttaaatagaaagtataaca

SEQ ID NO: 24121 - DNA, 768 bp, synthetic construct
  source 1..768: mol_type = other DNA
gtactctggtacgttagtaccttgtacgcctgttttcccctccttaaacaaattaagattaccactactgaggggagtagtccgactccgctccagcactgctgcaccagtgaattggtatgattagtacctcttcacggagtagatggtattcctaccccgcaacttagaagtttattaacaaaccgaccaataggtgcacagtatccagctgtgtaacggtcaagcacttctgtttccccggtccaccaggatcgttacccgcccgacccactacgagaagcctagtaactagccaagtgactgcgaagttgcgctcaaccacaaccccagtggtagctctggaagatggggctcgcacctcccccgtggtaacacggttgcctgcccgcgtgtgcttccgggttcggccttgtgccgttcacttctacgtcatgtaactagccaagagcctattgtgctgggacggttttcctccgggaccgtgaatgctgctaatcctaacctccgagcgtgtgcgcacaatccagtgttgctacgtcgtaacgcgtaagttggaggcggaacagactactttcggtaccccgtgtttcctcttttattatattatttaatggtgacaattgcagaaatttgtgatttagcgactttaccattgcacatagcattatattgtttgattgctttccacaaaacatctgatatacccaactcttatatcgatctacttatctttctttgcttgaagaataaattaaagaaagcacg

SEQ ID NO: 24122 - DNA, 718 bp, synthetic construct
  source 1..718: mol_type = other DNA
aattaagattaccactactgaggggagtagtccgactccgctccagcactgctgcaccagtgaattggtatgattagtacctcttcacggagtagatggtattcctaccccgcaacttagaagtttattaacaaaccgaccaataggtgcacagtatccagctgtgtaacggtcaagcacttctgtttccccggtccaccaggatcgttacccgcccgacccactacgagaagcctagtaactagccaagtgactgcgaagttgcgctcaaccacaaccccagtggtagctctggaagatggggctcgcacctcccccgtggtaacacggttgcctgcccgcgtgtgcttccgggttcggccttgtgccgttcacttctacgtcatgtaactagccaagagcctattgtgctgggacggttttcctccgggaccgtgaatgctgctaatcctaacctccgagcgtgtgcgcacaatccagtgttgctacgtcgtaacgcgtaagttggaggcggaacagactactttcggtaccccgtgtttcctcttttattatattatttaatggtgacaattgcagaaatttgtgatttagcgactttaccattgcacatagcattatattgtttgattgctttccacaaaacatctgatatacccaactcttatatcgatctacttatctttctttgcttgaagaataaattaaagaaagcacg

SEQ ID NO: 24123 - DNA, 668 bp, synthetic construct
  source 1..668: mol_type = other DNA
gctgcaccagtgaattggtatgattagtacctcttcacggagtagatggtattcctaccccgcaacttagaagtttattaacaaaccgaccaataggtgcacagtatccagctgtgtaacggtcaagcacttctgtttccccggtccaccaggatcgttacccgcccgacccactacgagaagcctagtaactagccaagtgactgcgaagttgcgctcaaccacaaccccagtggtagctctggaagatggggctcgcacctcccccgtggtaacacggttgcctgcccgcgtgtgcttccgggttcggccttgtgccgttcacttctacgtcatgtaactagccaagagcctattgtgctgggacggttttcctccgggaccgtgaatgctgctaatcctaacctccgagcgtgtgcgcacaatccagtgttgctacgtcgtaacgcgtaagttggaggcggaacagactactttcggtaccccgtgtttcctcttttattatattatttaatggtgacaattgcagaaatttgtgatttagcgactttaccattgcacatagcattatattgtttgattgctttccacaaaacatctgatatacccaactcttatatcgatctacttatctttctttgcttgaagaataaattaaagaaagcacg

SEQ ID NO: 24124 - DNA, 618 bp, synthetic construct
  source 1..618: mol_type = other DNA
attcctaccccgcaacttagaagtttattaacaaaccgaccaataggtgcacagtatccagctgtgtaacggtcaagcacttctgtttccccggtccaccaggatcgttacccgcccgacccactacgagaagcctagtaactagccaagtgactgcgaagttgcgctcaaccacaaccccagtggtagctctggaagatggggctcgcacctcccccgtggtaacacggttgcctgcccgcgtgtgcttccgggttcggccttgtgccgttcacttctacgtcatgtaactagccaagagcctattgtgctgggacggttttcctccgggaccgtgaatgctgctaatcctaacctccgagcgtgtgcgcacaatccagtgttgctacgtcgtaacgcgtaagttggaggcggaacagactactttcggtaccccgtgtttcctcttttattatattatttaatggtgacaattgcagaaatttgtgatttagcgactttaccattgcacatagcattatattgtttgattgctttccacaaaacatctgatatacccaactcttatatcgatctacttatctttctttgcttgaagaataaattaaagaaagcacg

SEQ ID NO: 24125 - DNA, 568 bp, synthetic construct
  source 1..568: mol_type = other DNA
acagtatccagctgtgtaacggtcaagcacttctgtttccccggtccaccaggatcgttacccgcccgacccactacgagaagcctagtaactagccaagtgactgcgaagttgcgctcaaccacaaccccagtggtagctctggaagatggggctcgcacctcccccgtggtaacacggttgcctgcccgcgtgtgcttccgggttcggccttgtgccgttcacttctacgtcatgtaactagccaagagcctattgtgctgggacggttttcctccgggaccgtgaatgctgctaatcctaacctccgagcgtgtgcgcacaatccagtgttgctacgtcgtaacgcgtaagttggaggcggaacagactactttcggtaccccgtgtttcctcttttattatattatttaatggtgacaattgcagaaatttgtgatttagcgactttaccattgcacatagcattatattgtttgattgctttccacaaaacatctgatatacccaactcttatatcgatctacttatctttctttgcttgaagaataaattaaagaaagcacg

SEQ ID NO: 24126 - DNA, 518 bp, synthetic construct
  source 1..518: mol_type = other DNA
aggatcgttacccgcccgacccactacgagaagcctagtaactagccaagtgactgcgaagttgcgctcaaccacaaccccagtggtagctctggaagatggggctcgcacctcccccgtggtaacacggttgcctgcccgcgtgtgcttccgggttcggccttgtgccgttcacttctacgtcatgtaactagccaagagcctattgtgctgggacggttttcctccgggaccgtgaatgctgctaatcctaacctccgagcgtgtgcgcacaatccagtgttgctacgtcgtaacgcgtaagttggaggcggaacagactactttcggtaccccgtgtttcctcttttattatattatttaatggtgacaattgcagaaatttgtgatttagcgactttaccattgcacatagcattatattgtttgattgctttccacaaaacatctgatatacccaactcttatatcgatctacttatctttctttgcttgaagaataaattaaagaaagcacg

SEQ ID NO: 24127 - DNA, 768 bp, synthetic construct
  source 1..768: mol_type = other DNA
tactctggttcgttagaacctttgtacgcctgttttcccctccttaaacaaattaagatctctgccaatgtggggagtagtccgactccgcaccgatacgtcgcaccagtagaccggttcgcttaggacccttctacggattggtatgagttccccaccccgtaacttagaagtactagcaaaaccgaccaataggagcgtggcacccagctgcgttaaggtcaagcacttctgtctccccggccagaaatggtcgtcacccgccctctctactacgagaagcctattaaccattgaaggcgatgaggagttgcgctccaccacaaccccagtggtagctctgagagatggggctcgcagtcacccccgtggtaacacggttgcttgcccgcgtgtgctctcgggttcggccacttggccgttcactccaactcgttgtaagtggccaagagcctattgtgctagagaggttttcctccggagccgtgaatgctgctaatcccaacctccgagcgtgtgcgcacaatccagtgttgctacgtcgtaacgcgcaagttggaggcggaacagactactttcggtactccgtgtttccttattattttatacaacaatttatggtgacattgactgatactattgagttcgcccgcttgccattgaatattgccttgtattaccttatagcatttcaaaaagccacagatctcaccctcgagctcattcactttgcagtttgtttgaatcgcatacacaagacatttgaac

SEQ ID NO: 24128 - DNA, 718 bp, synthetic construct
  source 1..718: mol_type = other DNA
aattaagatctctgccaatgtggggagtagtccgactccgcaccgatacgtcgcaccagtagaccggttcgcttaggacccttctacggattggtatgagttccccaccccgtaacttagaagtactagcaaaaccgaccaataggagcgtggcacccagctgcgttaaggtcaagcacttctgtctccccggccagaaatggtcgtcacccgccctctctactacgagaagcctattaaccattgaaggcgatgaggagttgcgctccaccacaaccccagtggtagctctgagagatggggctcgcagtcacccccgtggtaacacggttgcttgcccgcgtgtgctctcgggttcggccacttggccgttcactccaactcgttgtaagtggccaagagcctattgtgctagagaggttttcctccggagccgtgaatgctgctaatcccaacctccgagcgtgtgcgcacaatccagtgttgctacgtcgtaacgcgcaagttggaggcggaacagactactttcggtactccgtgtttccttattattttatacaacaatttatggtgacattgactgatactattgagttcgcccgcttgccattgaatattgccttgtattaccttatagcatttcaaaaagccacagatctcaccctcgagctcattcactttgcagtttgtttgaatcgcatacacaagacatttgaac

SEQ ID NO: 24129 - DNA, 668 bp, synthetic construct
  source 1..668: mol_type = other DNA
tcgcaccagtagaccggttcgcttaggacccttctacggattggtatgagttccccaccccgtaacttagaagtactagcaaaaccgaccaataggagcgtggcacccagctgcgttaaggtcaagcacttctgtctccccggccagaaatggtcgtcacccgccctctctactacgagaagcctattaaccattgaaggcgatgaggagttgcgctccaccacaaccccagtggtagctctgagagatggggctcgcagtcacccccgtggtaacacggttgcttgcccgcgtgtgctctcgggttcggccacttggccgttcactccaactcgttgtaagtggccaagagcctattgtgctagagaggttttcctccggagccgtgaatgctgctaatcccaacctccgagcgtgtgcgcacaatccagtgttgctacgtcgtaacgcgcaagttggaggcggaacagactactttcggtactccgtgtttccttattattttatacaacaatttatggtgacattgactgatactattgagttcgcccgcttgccattgaatattgccttgtattaccttatagcatttcaaaaagccacagatctcaccctcgagctcattcactttgcagtttgtttgaatcgcatacacaagacatttgaac

SEQ ID NO: 24130 - DNA, 618 bp, synthetic construct
  source 1..618: mol_type = other DNA
ttccccaccccgtaacttagaagtactagcaaaaccgaccaataggagcgtggcacccagctgcgttaaggtcaagcacttctgtctccccggccagaaatggtcgtcacccgccctctctactacgagaagcctattaaccattgaaggcgatgaggagttgcgctccaccacaaccccagtggtagctctgagagatggggctcgcagtcacccccgtggtaacacggttgcttgcccgcgtgtgctctcgggttcggccacttggccgttcactccaactcgttgtaagtggccaagagcctattgtgctagagaggttttcctccggagccgtgaatgctgctaatcccaacctccgagcgtgtgcgcacaatccagtgttgctacgtcgtaacgcgcaagttggaggcggaacagactactttcggtactccgtgtttccttattattttatacaacaatttatggtgacattgactgatactattgagttcgcccgcttgccattgaatattgccttgtattaccttatagcatttcaaaaagccacagatctcaccctcgagctcattcactttgcagtttgtttgaatcgcatacacaagacatttgaac

SEQ ID NO: 24131 - DNA, 568 bp, synthetic construct
  source 1..568: mol_type = other DNA
tggcacccagctgcgttaaggtcaagcacttctgtctccccggccagaaatggtcgtcacccgccctctctactacgagaagcctattaaccattgaaggcgatgaggagttgcgctccaccacaaccccagtggtagctctgagagatggggctcgcagtcacccccgtggtaacacggttgcttgcccgcgtgtgctctcgggttcggccacttggccgttcactccaactcgttgtaagtggccaagagcctattgtgctagagaggttttcctccggagccgtgaatgctgctaatcccaacctccgagcgtgtgcgcacaatccagtgttgctacgtcgtaacgcgcaagttggaggcggaacagactactttcggtactccgtgtttccttattattttatacaacaatttatggtgacattgactgatactattgagttcgcccgcttgccattgaatattgccttgtattaccttatagcatttcaaaaagccacagatctcaccctcgagctcattcactttgcagtttgtttgaatcgcatacacaagacatttgaac

SEQ ID NO: 24132 - DNA, 518 bp, synthetic construct
  source 1..518: mol_type = other DNA
tggtcgtcacccgccctctctactacgagaagcctattaaccattgaaggcgatgaggagttgcgctccaccacaaccccagtggtagctctgagagatggggctcgcagtcacccccgtggtaacacggttgcttgcccgcgtgtgctctcgggttcggccacttggccgttcactccaactcgttgtaagtggccaagagcctattgtgctagagaggttttcctccggagccgtgaatgctgctaatcccaacctccgagcgtgtgcgcacaatccagtgttgctacgtcgtaacgcgcaagttggaggcggaacagactactttcggtactccgtgtttccttattattttatacaacaatttatggtgacattgactgatactattgagttcgcccgcttgccattgaatattgccttgtattaccttatagcatttcaaaaagccacagatctcaccctcgagctcattcactttgcagtttgtttgaatcgcatacacaagacatttgaac

SEQ ID NO: 24133 - DNA, 768 bp, synthetic construct
  source 1..768: mol_type = other DNA
tactctggtttgcttagaacctttgtacgcctgttttcccccccctttaaataaattaagatctctgccaatgtggggagtagtccgactccgcaccgatacgtcgcaccagcagaccggttcgcctagaacccttctgcggattggtatgagttcctccccgaaacttagaagcaccgcaccaaccgaccaataggagcgtggcacccagccatgttacggtcaagcacttctgtttccccggtcagaaatgatcgttatccgccctctcccctacgagaagcctattaaccaccgaacgtggtgaagagttgcgctcagccacaatcccagtggtagctctgagagatggggctcgcatttcccccgtggtaacacggttgcttgcccgcgcgtgctctcgggttcagtcttctgactgttcactctgaaccacggtaagtggccaagagcctattgtgctggagaggttctcctccggagccgtgaatgctgctaatcccaacctctgagcgtgtgcgcacaatccagtgttgctacgtcgtaacgcgtaagtcggaggcggaacagactactttcggtactccgtgtttccttattatctattaatcaatttatggtgacactgactgatattgttgagtttgctcgattgcccttgaacattgccttatactatcttattgcattttaatagagccacagagcttactgttgagcttattgactttgctgtttacttgaatcaaatatacgcattagataaac

SEQ ID NO: 24134 - DNA, 718 bp, synthetic construct
  source 1..718: mol_type = other DNA
ataaattaagatctctgccaatgtggggagtagtccgactccgcaccgatacgtcgcaccagcagaccggttcgcctagaacccttctgcggattggtatgagttcctccccgaaacttagaagcaccgcaccaaccgaccaataggagcgtggcacccagccatgttacggtcaagcacttctgtttccccggtcagaaatgatcgttatccgccctctcccctacgagaagcctattaaccaccgaacgtggtgaagagttgcgctcagccacaatcccagtggtagctctgagagatggggctcgcatttcccccgtggtaacacggttgcttgcccgcgcgtgctctcgggttcagtcttctgactgttcactctgaaccacggtaagtggccaagagcctattgtgctggagaggttctcctccggagccgtgaatgctgctaatcccaacctctgagcgtgtgcgcacaatccagtgttgctacgtcgtaacgcgtaagtcggaggcggaacagactactttcggtactccgtgtttccttattatctattaatcaatttatggtgacactgactgatattgttgagtttgctcgattgcccttgaacattgccttatactatcttattgcattttaatagagccacagagcttactgttgagcttattgactttgctgtttacttgaatcaaatatacgcattagataaac

SEQ ID NO: 24135 - DNA, 668 bp, synthetic construct
  source 1..668: mol_type = other DNA
acgtcgcaccagcagaccggttcgcctagaacccttctgcggattggtatgagttcctccccgaaacttagaagcaccgcaccaaccgaccaataggagcgtggcacccagccatgttacggtcaagcacttctgtttccccggtcagaaatgatcgttatccgccctctcccctacgagaagcctattaaccaccgaacgtggtgaagagttgcgctcagccacaatcccagtggtagctctgagagatggggctcgcatttcccccgtggtaacacggttgcttgcccgcgcgtgctctcgggttcagtcttctgactgttcactctgaaccacggtaagtggccaagagcctattgtgctggagaggttctcctccggagccgtgaatgctgctaatcccaacctctgagcgtgtgcgcacaatccagtgttgctacgtcgtaacgcgtaagtcggaggcggaacagactactttcggtactccgtgtttccttattatctattaatcaatttatggtgacactgactgatattgttgagtttgctcgattgcccttgaacattgccttatactatcttattgcattttaatagagccacagagcttactgttgagcttattgactttgctgtttacttgaatcaaatatacgcattagataaac

SEQ ID NO: 24136 - DNA, 618 bp, synthetic construct
  source 1..618: mol_type = other DNA
gagttcctccccgaaacttagaagcaccgcaccaaccgaccaataggagcgtggcacccagccatgttacggtcaagcacttctgtttccccggtcagaaatgatcgttatccgccctctcccctacgagaagcctattaaccaccgaacgtggtgaagagttgcgctcagccacaatcccagtggtagctctgagagatggggctcgcatttcccccgtggtaacacggttgcttgcccgcgcgtgctctcgggttcagtcttctgactgttcactctgaaccacggtaagtggccaagagcctattgtgctggagaggttctcctccggagccgtgaatgctgctaatcccaacctctgagcgtgtgcgcacaatccagtgttgctacgtcgtaacgcgtaagtcggaggcggaacagactactttcggtactccgtgtttccttattatctattaatcaatttatggtgacactgactgatattgttgagtttgctcgattgcccttgaacattgccttatactatcttattgcattttaatagagccacagagcttactgttgagcttattgactttgctgtttacttgaatcaaatatacgcattagataaac

SEQ ID NO: 24137 - DNA, 568 bp, synthetic construct
  source 1..568: mol_type = other DNA
gtggcacccagccatgttacggtcaagcacttctgtttccccggtcagaaatgatcgttatccgccctctcccctacgagaagcctattaaccaccgaacgtggtgaagagttgcgctcagccacaatcccagtggtagctctgagagatggggctcgcatttcccccgtggtaacacggttgcttgcccgcgcgtgctctcgggttcagtcttctgactgttcactctgaaccacggtaagtggccaagagcctattgtgctggagaggttctcctccggagccgtgaatgctgctaatcccaacctctgagcgtgtgcgcacaatccagtgttgctacgtcgtaacgcgtaagtcggaggcggaacagactactttcggtactccgtgtttccttattatctattaatcaatttatggtgacactgactgatattgttgagtttgctcgattgcccttgaacattgccttatactatcttattgcattttaatagagccacagagcttactgttgagcttattgactttgctgtttacttgaatcaaatatacgcattagataaac

SEQ ID NO: 24138 - DNA, 518 bp, synthetic construct
  source 1..518: mol_type = other DNA
atgatcgttatccgccctctcccctacgagaagcctattaaccaccgaacgtggtgaagagttgcgctcagccacaatcccagtggtagctctgagagatggggctcgcatttcccccgtggtaacacggttgcttgcccgcgcgtgctctcgggttcagtcttctgactgttcactctgaaccacggtaagtggccaagagcctattgtgctggagaggttctcctccggagccgtgaatgctgctaatcccaacctctgagcgtgtgcgcacaatccagtgttgctacgtcgtaacgcgtaagtcggaggcggaacagactactttcggtactccgtgtttccttattatctattaatcaatttatggtgacactgactgatattgttgagtttgctcgattgcccttgaacattgccttatactatcttattgcattttaatagagccacagagcttactgttgagcttattgactttgctgtttacttgaatcaaatatacgcattagataaac

SEQ ID NO: 24139 - DNA, 769 bp, synthetic construct
  source 1..769: mol_type = other DNA
gtactctggtacgttagtacctttgtacgcctgttttcccctcccttaaataaattaagattaccactactgaggggagtagtccgactccgctccgacaatgtcgcaccagtgcactggtacgctagtaccttttcacggagtagctggtattccctcccgaaacttagaagcacttaaatcaaccgaccaataggcgcgcggtagccagccgcgttacggtcaagcactcctgtttccccggtccacaaggatcgttacccgcccgacccactgcgagaaacctagtagttggccaagtggtaacgaggttgcgctcagccacaaccccagtggtagctccggaagatggggctcgcaccacccccgcggtaacgcggttgcttgcccgcgcgtgcttccgggtccggtctcgtaccgttcacctcaataccacgtaaccagcaaagagtctattgcgctgggacggttttcctccggggccgtgaatgctgctaatcccaacctccgagcgtgtgcgcacaatccagtgttgctacgtcgtaacgcgtaagttggaggcggaacagactactttcggtaccccgtgtttccctatcattccatttcattttatggtgacaattgctgagatctgtgatttggcgaccttaccactgaatattgccttatattacttggttgcattccacaaaacctctgacatacctgcttcctatatcgacctacttgttttcctcaatttaaagtatagactacaaatagcaga

SEQ ID NO: 24140 - DNA, 719 bp, synthetic construct
  source 1..719: mol_type = other DNA
taaattaagattaccactactgaggggagtagtccgactccgctccgacaatgtcgcaccagtgcactggtacgctagtaccttttcacggagtagctggtattccctcccgaaacttagaagcacttaaatcaaccgaccaataggcgcgcggtagccagccgcgttacggtcaagcactcctgtttccccggtccacaaggatcgttacccgcccgacccactgcgagaaacctagtagttggccaagtggtaacgaggttgcgctcagccacaaccccagtggtagctccggaagatggggctcgcaccacccccgcggtaacgcggttgcttgcccgcgcgtgcttccgggtccggtctcgtaccgttcacctcaataccacgtaaccagcaaagagtctattgcgctgggacggttttcctccggggccgtgaatgctgctaatcccaacctccgagcgtgtgcgcacaatccagtgttgctacgtcgtaacgcgtaagttggaggcggaacagactactttcggtaccccgtgtttccctatcattccatttcattttatggtgacaattgctgagatctgtgatttggcgaccttaccactgaatattgccttatattacttggttgcattccacaaaacctctgacatacctgcttcctatatcgacctacttgttttcctcaatttaaagtatagactacaaatagcaga

SEQ ID NO: 24141 - DNA, 669 bp, synthetic construct
  source 1..669: mol_type = other DNA
atgtcgcaccagtgcactggtacgctagtaccttttcacggagtagctggtattccctcccgaaacttagaagcacttaaatcaaccgaccaataggcgcgcggtagccagccgcgttacggtcaagcactcctgtttccccggtccacaaggatcgttacccgcccgacccactgcgagaaacctagtagttggccaagtggtaacgaggttgcgctcagccacaaccccagtggtagctccggaagatggggctcgcaccacccccgcggtaacgcggttgcttgcccgcgcgtgcttccgggtccggtctcgtaccgttcacctcaataccacgtaaccagcaaagagtctattgcgctgggacggttttcctccggggccgtgaatgctgctaatcccaacctccgagcgtgtgcgcacaatccagtgttgctacgtcgtaacgcgtaagttggaggcggaacagactactttcggtaccccgtgtttccctatcattccatttcattttatggtgacaattgctgagatctgtgatttggcgaccttaccactgaatattgccttatattacttggttgcattccacaaaacctctgacatacctgcttcctatatcgacctacttgttttcctcaatttaaagtatagactacaaatagcaga

SEQ ID NO: 24142 - DNA, 619 bp, synthetic construct
  source 1..619: mol_type = other DNA
tattccctcccgaaacttagaagcacttaaatcaaccgaccaataggcgcgcggtagccagccgcgttacggtcaagcactcctgtttccccggtccacaaggatcgttacccgcccgacccactgcgagaaacctagtagttggccaagtggtaacgaggttgcgctcagccacaaccccagtggtagctccggaagatggggctcgcaccacccccgcggtaacgcggttgcttgcccgcgcgtgcttccgggtccggtctcgtaccgttcacctcaataccacgtaaccagcaaagagtctattgcgctgggacggttttcctccggggccgtgaatgctgctaatcccaacctccgagcgtgtgcgcacaatccagtgttgctacgtcgtaacgcgtaagttggaggcggaacagactactttcggtaccccgtgtttccctatcattccatttcattttatggtgacaattgctgagatctgtgatttggcgaccttaccactgaatattgccttatattacttggttgcattccacaaaacctctgacatacctgcttcctatatcgacctacttgttttcctcaatttaaagtatagactacaaatagcaga

SEQ ID NO: 24143 - DNA, 569 bp, synthetic construct
  source 1..569: mol_type = other DNA
gcggtagccagccgcgttacggtcaagcactcctgtttccccggtccacaaggatcgttacccgcccgacccactgcgagaaacctagtagttggccaagtggtaacgaggttgcgctcagccacaaccccagtggtagctccggaagatggggctcgcaccacccccgcggtaacgcggttgcttgcccgcgcgtgcttccgggtccggtctcgtaccgttcacctcaataccacgtaaccagcaaagagtctattgcgctgggacggttttcctccggggccgtgaatgctgctaatcccaacctccgagcgtgtgcgcacaatccagtgttgctacgtcgtaacgcgtaagttggaggcggaacagactactttcggtaccccgtgtttccctatcattccatttcattttatggtgacaattgctgagatctgtgatttggcgaccttaccactgaatattgccttatattacttggttgcattccacaaaacctctgacatacctgcttcctatatcgacctacttgttttcctcaatttaaagtatagactacaaatagcaga

SEQ ID NO: 24144 - DNA, 519 bp, synthetic construct
  source 1..519: mol_type = other DNA
aggatcgttacccgcccgacccactgcgagaaacctagtagttggccaagtggtaacgaggttgcgctcagccacaaccccagtggtagctccggaagatggggctcgcaccacccccgcggtaacgcggttgcttgcccgcgcgtgcttccgggtccggtctcgtaccgttcacctcaataccacgtaaccagcaaagagtctattgcgctgggacggttttcctccggggccgtgaatgctgctaatcccaacctccgagcgtgtgcgcacaatccagtgttgctacgtcgtaacgcgtaagttggaggcggaacagactactttcggtaccccgtgtttccctatcattccatttcattttatggtgacaattgctgagatctgtgatttggcgaccttaccactgaatattgccttatattacttggttgcattccacaaaacctctgacatacctgcttcctatatcgacctacttgttttcctcaatttaaagtatagactacaaatagcaga

SEQ ID NO: 24145 - DNA, 769 bp, synthetic construct
  source 1..769: mol_type = other DNA
tactctggttcgtttagaacccttgtacgcctgttttcccctcccttaaacaaattaagatctctgccaatgtggggagtagtccgactccgcaccgatacgtcgcaccagcagaccggttcgcttagaacccttctgcggattggtatgagttccccccccttgcaacttagaagcatgagaacaaccgaccaataggagcatggcatccagccgtgtcacggtcaagcacttctgtttccccggccagagatggtcgttacccgccctacccactacgagaagcctattaactaccgaaatcagcgaagagttgcactcagccacaaccccggtggtagctctgagagatggggctcgcaacaacccccgtggtaacacggttgcttgcccgcgcgtgctctcgggttcagtctttgactgttcactccgacctgacgtaagtagccaagagcctattgtgctgggaaggttttcctccggagccgtgaatgctgctaatcctaacctccgagcgtgtgcgcacaaaccagtgttgctacgtcgtaacgcgcaagttggaggcggaacagactactttcggtactccgtgtttccttattttattaactccaatttatggtgacattgactgatattgttgtatttgcccgcctaccgttgaacatagctttatatcatctcattgcattcaagaaatccacagagcttaccctggaactccttgactttgcagttttcttaaatcggatacataaactcagtaaga

SEQ ID NO: 24146 - DNA, 719 bp, synthetic construct
  source 1..719: mol_type = other DNA
caaattaagatctctgccaatgtggggagtagtccgactccgcaccgatacgtcgcaccagcagaccggttcgcttagaacccttctgcggattggtatgagttccccccccttgcaacttagaagcatgagaacaaccgaccaataggagcatggcatccagccgtgtcacggtcaagcacttctgtttccccggccagagatggtcgttacccgccctacccactacgagaagcctattaactaccgaaatcagcgaagagttgcactcagccacaaccccggtggtagctctgagagatggggctcgcaacaacccccgtggtaacacggttgcttgcccgcgcgtgctctcgggttcagtctttgactgttcactccgacctgacgtaagtagccaagagcctattgtgctgggaaggttttcctccggagccgtgaatgctgctaatcctaacctccgagcgtgtgcgcacaaaccagtgttgctacgtcgtaacgcgcaagttggaggcggaacagactactttcggtactccgtgtttccttattttattaactccaatttatggtgacattgactgatattgttgtatttgcccgcctaccgttgaacatagctttatatcatctcattgcattcaagaaatccacagagcttaccctggaactccttgactttgcagttttcttaaatcggatacataaactcagtaaga

SEQ ID NO: 24147 - DNA, 669 bp, synthetic construct
  source 1..669: mol_type = other DNA
cgtcgcaccagcagaccggttcgcttagaacccttctgcggattggtatgagttccccccccttgcaacttagaagcatgagaacaaccgaccaataggagcatggcatccagccgtgtcacggtcaagcacttctgtttccccggccagagatggtcgttacccgccctacccactacgagaagcctattaactaccgaaatcagcgaagagttgcactcagccacaaccccggtggtagctctgagagatggggctcgcaacaacccccgtggtaacacggttgcttgcccgcgcgtgctctcgggttcagtctttgactgttcactccgacctgacgtaagtagccaagagcctattgtgctgggaaggttttcctccggagccgtgaatgctgctaatcctaacctccgagcgtgtgcgcacaaaccagtgttgctacgtcgtaacgcgcaagttggaggcggaacagactactttcggtactccgtgtttccttattttattaactccaatttatggtgacattgactgatattgttgtatttgcccgcctaccgttgaacatagctttatatcatctcattgcattcaagaaatccacagagcttaccctggaactccttgactttgcagttttcttaaatcggatacataaactcagtaaga

SEQ ID NO: 24148 - DNA, 619 bp, synthetic construct
  source 1..619: mol_type = other DNA
agttccccccccttgcaacttagaagcatgagaacaaccgaccaataggagcatggcatccagccgtgtcacggtcaagcacttctgtttccccggccagagatggtcgttacccgccctacccactacgagaagcctattaactaccgaaatcagcgaagagttgcactcagccacaaccccggtggtagctctgagagatggggctcgcaacaacccccgtggtaacacggttgcttgcccgcgcgtgctctcgggttcagtctttgactgttcactccgacctgacgtaagtagccaagagcctattgtgctgggaaggttttcctccggagccgtgaatgctgctaatcctaacctccgagcgtgtgcgcacaaaccagtgttgctacgtcgtaacgcgcaagttggaggcggaacagactactttcggtactccgtgtttccttattttattaactccaatttatggtgacattgactgatattgttgtatttgcccgcctaccgttgaacatagctttatatcatctcattgcattcaagaaatccacagagcttaccctggaactccttgactttgcagttttcttaaatcggatacataaactcagtaaga

SEQ ID NO: 24149 - DNA, 569 bp, synthetic construct
  source 1..569: mol_type = other DNA
gcatggcatccagccgtgtcacggtcaagcacttctgtttccccggccagagatggtcgttacccgccctacccactacgagaagcctattaactaccgaaatcagcgaagagttgcactcagccacaaccccggtggtagctctgagagatggggctcgcaacaacccccgtggtaacacggttgcttgcccgcgcgtgctctcgggttcagtctttgactgttcactccgacctgacgtaagtagccaagagcctattgtgctgggaaggttttcctccggagccgtgaatgctgctaatcctaacctccgagcgtgtgcgcacaaaccagtgttgctacgtcgtaacgcgcaagttggaggcggaacagactactttcggtactccgtgtttccttattttattaactccaatttatggtgacattgactgatattgttgtatttgcccgcctaccgttgaacatagctttatatcatctcattgcattcaagaaatccacagagcttaccctggaactccttgactttgcagttttcttaaatcggatacataaactcagtaaga

SEQ ID NO: 24150 - DNA, 519 bp, synthetic construct
  source 1..519: mol_type = other DNA
agatggtcgttacccgccctacccactacgagaagcctattaactaccgaaatcagcgaagagttgcactcagccacaaccccggtggtagctctgagagatggggctcgcaacaacccccgtggtaacacggttgcttgcccgcgcgtgctctcgggttcagtctttgactgttcactccgacctgacgtaagtagccaagagcctattgtgctgggaaggttttcctccggagccgtgaatgctgctaatcctaacctccgagcgtgtgcgcacaaaccagtgttgctacgtcgtaacgcgcaagttggaggcggaacagactactttcggtactccgtgtttccttattttattaactccaatttatggtgacattgactgatattgttgtatttgcccgcctaccgttgaacatagctttatatcatctcattgcattcaagaaatccacagagcttaccctggaactccttgactttgcagttttcttaaatcggatacataaactcagtaaga

SEQ ID NO: 24151 - DNA, 769 bp, synthetic construct
  source 1..769: mol_type = other DNA
tactctggtatgcttaatacctttgtacgcctgtttttccctcccttaaataaattaagattaccactactgaggggagtagtccgactccgctccggtaccgccgcaccagtactccggtacgctcagtaccctagtacggagtagttggtattccctccctgtaatttagaagtatgaaattaaaccgaccaataggaggcgtggcatccagtcgcgttacggtcaagcacttctgtttccccggtccgtaaggatcgttacccgcccgacccactacggaaagcctagtaactggccaactggatgagaggttgcactcagccacaaccccagtggtagctctggaagatggggctcgcaccttcccccgtggtaacacggttgcttgcccgcgtgtgctcccgggttcggtccccgaccgttcacttcgattccaggtaaccagccaagagccaactgtgctgggacggttttcctccggggccgtgaatgctgctaatcctaacctccgagcgtgtgcgcgcaaaccagcgttgctacgtcgtaacgcgtaagttggaggcggaacagactactttcggtaccccgtgtttccttttattttacttattgtttatggttacactgactgatatttgtgagtttgctcgtttgcctttgaatattgctttgtattactttgttgcttttcacaaaacgacccagctcaccgttgaacttgtcgattttgctgtttttcttaatctaacctacaagaaacttaaca

SEQ ID NO: 24152 - DNA, 719 bp, synthetic construct
  source 1..719: mol_type = other DNA
taaattaagattaccactactgaggggagtagtccgactccgctccggtaccgccgcaccagtactccggtacgctcagtaccctagtacggagtagttggtattccctccctgtaatttagaagtatgaaattaaaccgaccaataggaggcgtggcatccagtcgcgttacggtcaagcacttctgtttccccggtccgtaaggatcgttacccgcccgacccactacggaaagcctagtaactggccaactggatgagaggttgcactcagccacaaccccagtggtagctctggaagatggggctcgcaccttcccccgtggtaacacggttgcttgcccgcgtgtgctcccgggttcggtccccgaccgttcacttcgattccaggtaaccagccaagagccaactgtgctgggacggttttcctccggggccgtgaatgctgctaatcctaacctccgagcgtgtgcgcgcaaaccagcgttgctacgtcgtaacgcgtaagttggaggcggaacagactactttcggtaccccgtgtttccttttattttacttattgtttatggttacactgactgatatttgtgagtttgctcgtttgcctttgaatattgctttgtattactttgttgcttttcacaaaacgacccagctcaccgttgaacttgtcgattttgctgtttttcttaatctaacctacaagaaacttaaca

SEQ ID NO: 24153 - DNA, 669 bp, synthetic construct
  source 1..669: mol_type = other DNA
ccgccgcaccagtactccggtacgctcagtaccctagtacggagtagttggtattccctccctgtaatttagaagtatgaaattaaaccgaccaataggaggcgtggcatccagtcgcgttacggtcaagcacttctgtttccccggtccgtaaggatcgttacccgcccgacccactacggaaagcctagtaactggccaactggatgagaggttgcactcagccacaaccccagtggtagctctggaagatggggctcgcaccttcccccgtggtaacacggttgcttgcccgcgtgtgctcccgggttcggtccccgaccgttcacttcgattccaggtaaccagccaagagccaactgtgctgggacggttttcctccggggccgtgaatgctgctaatcctaacctccgagcgtgtgcgcgcaaaccagcgttgctacgtcgtaacgcgtaagttggaggcggaacagactactttcggtaccccgtgtttccttttattttacttattgtttatggttacactgactgatatttgtgagtttgctcgtttgcctttgaatattgctttgtattactttgttgcttttcacaaaacgacccagctcaccgttgaacttgtcgattttgctgtttttcttaatctaacctacaagaaacttaaca

SEQ ID NO: 24154 - DNA, 619 bp, synthetic construct
  source 1..619: mol_type = other DNA
gtattccctccctgtaatttagaagtatgaaattaaaccgaccaataggaggcgtggcatccagtcgcgttacggtcaagcacttctgtttccccggtccgtaaggatcgttacccgcccgacccactacggaaagcctagtaactggccaactggatgagaggttgcactcagccacaaccccagtggtagctctggaagatggggctcgcaccttcccccgtggtaacacggttgcttgcccgcgtgtgctcccgggttcggtccccgaccgttcacttcgattccaggtaaccagccaagagccaactgtgctgggacggttttcctccggggccgtgaatgctgctaatcctaacctccgagcgtgtgcgcgcaaaccagcgttgctacgtcgtaacgcgtaagttggaggcggaacagactactttcggtaccccgtgtttccttttattttacttattgtttatggttacactgactgatatttgtgagtttgctcgtttgcctttgaatattgctttgtattactttgttgcttttcacaaaacgacccagctcaccgttgaacttgtcgattttgctgtttttcttaatctaacctacaagaaacttaaca

SEQ ID NO: 24155 - DNA, 569 bp, synthetic construct
  source 1..569: mol_type = other DNA
ggcgtggcatccagtcgcgttacggtcaagcacttctgtttccccggtccgtaaggatcgttacccgcccgacccactacggaaagcctagtaactggccaactggatgagaggttgcactcagccacaaccccagtggtagctctggaagatggggctcgcaccttcccccgtggtaacacggttgcttgcccgcgtgtgctcccgggttcggtccccgaccgttcacttcgattccaggtaaccagccaagagccaactgtgctgggacggttttcctccggggccgtgaatgctgctaatcctaacctccgagcgtgtgcgcgcaaaccagcgttgctacgtcgtaacgcgtaagttggaggcggaacagactactttcggtaccccgtgtttccttttattttacttattgtttatggttacactgactgatatttgtgagtttgctcgtttgcctttgaatattgctttgtattactttgttgcttttcacaaaacgacccagctcaccgttgaacttgtcgattttgctgtttttcttaatctaacctacaagaaacttaaca

SEQ ID NO: 24156 - DNA, 519 bp, synthetic construct
  source 1..519: mol_type = other DNA
gtaaggatcgttacccgcccgacccactacggaaagcctagtaactggccaactggatgagaggttgcactcagccacaaccccagtggtagctctggaagatggggctcgcaccttcccccgtggtaacacggttgcttgcccgcgtgtgctcccgggttcggtccccgaccgttcacttcgattccaggtaaccagccaagagccaactgtgctgggacggttttcctccggggccgtgaatgctgctaatcctaacctccgagcgtgtgcgcgcaaaccagcgttgctacgtcgtaacgcgtaagttggaggcggaacagactactttcggtaccccgtgtttccttttattttacttattgtttatggttacactgactgatatttgtgagtttgctcgtttgcctttgaatattgctttgtattactttgttgcttttcacaaaacgacccagctcaccgttgaacttgtcgattttgctgtttttcttaatctaacctacaagaaacttaaca

SEQ ID NO: 24157 - DNA, 770 bp, synthetic construct
  source 1..770: mol_type = other DNA
gtactctggtacgccagtacctttgtacgcctgttttcccctccctaaataaattaagattaccactactgaggggagtagtccgactccgctccggcaatgccgcaccagtgcactggtacgctagtaccttttcacggagtagatggtattcctcaccccgaaacttagaagcacgaaaacaaaccgaccaataggtgcatggcatccagccgtgttatggtcaagcacttctgtttccccggtccgcaaggatcgttacccgcccgacccactacgagaagcctagtaactgaccaagtagttgagaggttgcgctcagccacaaccccagtggtagctctggaagatggggctcgcacttcccccgtggtaacacggttgcttgcccgcgcgtgcttccgggttcggcctctgccgttcacctcgattctgcgtaatcagccaagagcctattgtgctgggacggtttcctccggggccgtgaatgctgctaatcccaacctccgagcgtgtgcgcacaatccagtgttgctacgtcgtaacgcgtaagttggaggcggaacagactactttcggaaccccgtgtttcctttgttttaattttaatgctttatggtgacaattgttgagatctgcgatctagcgaccttgccattgaacattgctttgtattatttggttgcattccacaaaacctctgacatacccagctcctatattgatcttttggtttatctaaacttaaaacacaaactcgaaggattgcg

SEQ ID NO: 24158 - DNA, 720 bp, synthetic construct
  source 1..720: mol_type = other DNA
aaattaagattaccactactgaggggagtagtccgactccgctccggcaatgccgcaccagtgcactggtacgctagtaccttttcacggagtagatggtattcctcaccccgaaacttagaagcacgaaaacaaaccgaccaataggtgcatggcatccagccgtgttatggtcaagcacttctgtttccccggtccgcaaggatcgttacccgcccgacccactacgagaagcctagtaactgaccaagtagttgagaggttgcgctcagccacaaccccagtggtagctctggaagatggggctcgcacttcccccgtggtaacacggttgcttgcccgcgcgtgcttccgggttcggcctctgccgttcacctcgattctgcgtaatcagccaagagcctattgtgctgggacggtttcctccggggccgtgaatgctgctaatcccaacctccgagcgtgtgcgcacaatccagtgttgctacgtcgtaacgcgtaagttggaggcggaacagactactttcggaaccccgtgtttcctttgttttaattttaatgctttatggtgacaattgttgagatctgcgatctagcgaccttgccattgaacattgctttgtattatttggttgcattccacaaaacctctgacatacccagctcctatattgatcttttggtttatctaaacttaaaacacaaactcgaaggattgcg

SEQ ID NO: 24159 - DNA, 670 bp, synthetic construct
  source 1..670: mol_type = other DNA
tgccgcaccagtgcactggtacgctagtaccttttcacggagtagatggtattcctcaccccgaaacttagaagcacgaaaacaaaccgaccaataggtgcatggcatccagccgtgttatggtcaagcacttctgtttccccggtccgcaaggatcgttacccgcccgacccactacgagaagcctagtaactgaccaagtagttgagaggttgcgctcagccacaaccccagtggtagctctggaagatggggctcgcacttcccccgtggtaacacggttgcttgcccgcgcgtgcttccgggttcggcctctgccgttcacctcgattctgcgtaatcagccaagagcctattgtgctgggacggtttcctccggggccgtgaatgctgctaatcccaacctccgagcgtgtgcgcacaatccagtgttgctacgtcgtaacgcgtaagttggaggcggaacagactactttcggaaccccgtgtttcctttgttttaattttaatgctttatggtgacaattgttgagatctgcgatctagcgaccttgccattgaacattgctttgtattatttggttgcattccacaaaacctctgacatacccagctcctatattgatcttttggtttatctaaacttaaaacacaaactcgaaggattgcg

SEQ ID NO: 24160 - DNA, 620 bp, synthetic construct
  source 1..620: mol_type = other DNA
attcctcaccccgaaacttagaagcacgaaaacaaaccgaccaataggtgcatggcatccagccgtgttatggtcaagcacttctgtttccccggtccgcaaggatcgttacccgcccgacccactacgagaagcctagtaactgaccaagtagttgagaggttgcgctcagccacaaccccagtggtagctctggaagatggggctcgcacttcccccgtggtaacacggttgcttgcccgcgcgtgcttccgggttcggcctctgccgttcacctcgattctgcgtaatcagccaagagcctattgtgctgggacggtttcctccggggccgtgaatgctgctaatcccaacctccgagcgtgtgcgcacaatccagtgttgctacgtcgtaacgcgtaagttggaggcggaacagactactttcggaaccccgtgtttcctttgttttaattttaatgctttatggtgacaattgttgagatctgcgatctagcgaccttgccattgaacattgctttgtattatttggttgcattccacaaaacctctgacatacccagctcctatattgatcttttggtttatctaaacttaaaacacaaactcgaaggattgcg

SEQ ID NO: 24161 - DNA, 570 bp, synthetic construct
  source 1..570: mol_type = other DNA
catggcatccagccgtgttatggtcaagcacttctgtttccccggtccgcaaggatcgttacccgcccgacccactacgagaagcctagtaactgaccaagtagttgagaggttgcgctcagccacaaccccagtggtagctctggaagatggggctcgcacttcccccgtggtaacacggttgcttgcccgcgcgtgcttccgggttcggcctctgccgttcacctcgattctgcgtaatcagccaagagcctattgtgctgggacggtttcctccggggccgtgaatgctgctaatcccaacctccgagcgtgtgcgcacaatccagtgttgctacgtcgtaacgcgtaagttggaggcggaacagactactttcggaaccccgtgtttcctttgttttaattttaatgctttatggtgacaattgttgagatctgcgatctagcgaccttgccattgaacattgctttgtattatttggttgcattccacaaaacctctgacatacccagctcctatattgatcttttggtttatctaaacttaaaacacaaactcgaaggattgcg

SEQ ID NO: 24162 - DNA, 520 bp, synthetic construct
  source 1..520: mol_type = other DNA
aaggatcgttacccgcccgacccactacgagaagcctagtaactgaccaagtagttgagaggttgcgctcagccacaaccccagtggtagctctggaagatggggctcgcacttcccccgtggtaacacggttgcttgcccgcgcgtgcttccgggttcggcctctgccgttcacctcgattctgcgtaatcagccaagagcctattgtgctgggacggtttcctccggggccgtgaatgctgctaatcccaacctccgagcgtgtgcgcacaatccagtgttgctacgtcgtaacgcgtaagttggaggcggaacagactactttcggaaccccgtgtttcctttgttttaattttaatgctttatggtgacaattgttgagatctgcgatctagcgaccttgccattgaacattgctttgtattatttggttgcattccacaaaacctctgacatacccagctcctatattgatcttttggtttatctaaacttaaaacacaaactcgaaggattgcg

SEQ ID NO: 24163 - DNA, 770 bp, synthetic construct
  source 1..770: mol_type = other DNA
tactctggtacgcttagtacctttgtacgcctgttttccctttcccttaaacaaattaagattaccactgttgaggggagtagtccgactccgctccggcactgccgcaccagtactccggtatgcctagtaccctagtacggagcagatggtatccccctttccctgaaacttagaagtctgacgcaaacccgaccaataggagcgcggtatccaaccgcgtaacggtcaagcacttctgtttccccggtccgcaaggatcgttacccgcccgtcccactacgggaagcctagtaactggccaactgagtgagaggttgcgctcagccacatacccagtggtagctctggaagatggggctcgcactccccccgtggtaacacggttgcttgcccgcgtgtgcttccgggttcggtttcgaccgttcacctcaaccccaggtaaccagccaagagcctactgtgctggagcggttttcctccggagccgtgaatgctgctaatcccaacctccgagcgtgtgcgcacaaaccagtgttgctacgtcgtaacgcgtaagttggaggcggaacagactactttcggtactccgtgtttccttttgttttatctattgtttatggtgacactgtctgacatttgtgaatttgctcgcttacccttgaatattgcattgtattatctggttgcatttcacaacacaacccaactctccattgaactcatcaactttgctgtatttcttaacacaatacaaagaaagcgagata

SEQ ID NO: 24164 - DNA, 720 bp, synthetic construct
  source 1..720: mol_type = other DNA
acaaattaagattaccactgttgaggggagtagtccgactccgctccggcactgccgcaccagtactccggtatgcctagtaccctagtacggagcagatggtatccccctttccctgaaacttagaagtctgacgcaaacccgaccaataggagcgcggtatccaaccgcgtaacggtcaagcacttctgtttccccggtccgcaaggatcgttacccgcccgtcccactacgggaagcctagtaactggccaactgagtgagaggttgcgctcagccacatacccagtggtagctctggaagatggggctcgcactccccccgtggtaacacggttgcttgcccgcgtgtgcttccgggttcggtttcgaccgttcacctcaaccccaggtaaccagccaagagcctactgtgctggagcggttttcctccggagccgtgaatgctgctaatcccaacctccgagcgtgtgcgcacaaaccagtgttgctacgtcgtaacgcgtaagttggaggcggaacagactactttcggtactccgtgtttccttttgttttatctattgtttatggtgacactgtctgacatttgtgaatttgctcgcttacccttgaatattgcattgtattatctggttgcatttcacaacacaacccaactctccattgaactcatcaactttgctgtatttcttaacacaatacaaagaaagcgagata

SEQ ID NO: 24165 - DNA, 670 bp, synthetic construct
  source 1..670: mol_type = other DNA
actgccgcaccagtactccggtatgcctagtaccctagtacggagcagatggtatccccctttccctgaaacttagaagtctgacgcaaacccgaccaataggagcgcggtatccaaccgcgtaacggtcaagcacttctgtttccccggtccgcaaggatcgttacccgcccgtcccactacgggaagcctagtaactggccaactgagtgagaggttgcgctcagccacatacccagtggtagctctggaagatggggctcgcactccccccgtggtaacacggttgcttgcccgcgtgtgcttccgggttcggtttcgaccgttcacctcaaccccaggtaaccagccaagagcctactgtgctggagcggttttcctccggagccgtgaatgctgctaatcccaacctccgagcgtgtgcgcacaaaccagtgttgctacgtcgtaacgcgtaagttggaggcggaacagactactttcggtactccgtgtttccttttgttttatctattgtttatggtgacactgtctgacatttgtgaatttgctcgcttacccttgaatattgcattgtattatctggttgcatttcacaacacaacccaactctccattgaactcatcaactttgctgtatttcttaacacaatacaaagaaagcgagata

SEQ ID NO: 24166 - DNA, 620 bp, synthetic construct
  source 1..620: mol_type = other DNA
ggtatccccctttccctgaaacttagaagtctgacgcaaacccgaccaataggagcgcggtatccaaccgcgtaacggtcaagcacttctgtttccccggtccgcaaggatcgttacccgcccgtcccactacgggaagcctagtaactggccaactgagtgagaggttgcgctcagccacatacccagtggtagctctggaagatggggctcgcactccccccgtggtaacacggttgcttgcccgcgtgtgcttccgggttcggtttcgaccgttcacctcaaccccaggtaaccagccaagagcctactgtgctggagcggttttcctccggagccgtgaatgctgctaatcccaacctccgagcgtgtgcgcacaaaccagtgttgctacgtcgtaacgcgtaagttggaggcggaacagactactttcggtactccgtgtttccttttgttttatctattgtttatggtgacactgtctgacatttgtgaatttgctcgcttacccttgaatattgcattgtattatctggttgcatttcacaacacaacccaactctccattgaactcatcaactttgctgtatttcttaacacaatacaaagaaagcgagata

SEQ ID NO: 24167 - DNA, 570 bp, synthetic construct
  source 1..570: mol_type = other DNA
aggagcgcggtatccaaccgcgtaacggtcaagcacttctgtttccccggtccgcaaggatcgttacccgcccgtcccactacgggaagcctagtaactggccaactgagtgagaggttgcgctcagccacatacccagtggtagctctggaagatggggctcgcactccccccgtggtaacacggttgcttgcccgcgtgtgcttccgggttcggtttcgaccgttcacctcaaccccaggtaaccagccaagagcctactgtgctggagcggttttcctccggagccgtgaatgctgctaatcccaacctccgagcgtgtgcgcacaaaccagtgttgctacgtcgtaacgcgtaagttggaggcggaacagactactttcggtactccgtgtttccttttgttttatctattgtttatggtgacactgtctgacatttgtgaatttgctcgcttacccttgaatattgcattgtattatctggttgcatttcacaacacaacccaactctccattgaactcatcaactttgctgtatttcttaacacaatacaaagaaagcgagata

SEQ ID NO: 24168 - DNA, 520 bp, synthetic construct
  source 1..520: mol_type = other DNA
tccgcaaggatcgttacccgcccgtcccactacgggaagcctagtaactggccaactgagtgagaggttgcgctcagccacatacccagtggtagctctggaagatggggctcgcactccccccgtggtaacacggttgcttgcccgcgtgtgcttccgggttcggtttcgaccgttcacctcaaccccaggtaaccagccaagagcctactgtgctggagcggttttcctccggagccgtgaatgctgctaatcccaacctccgagcgtgtgcgcacaaaccagtgttgctacgtcgtaacgcgtaagttggaggcggaacagactactttcggtactccgtgtttccttttgttttatctattgtttatggtgacactgtctgacatttgtgaatttgctcgcttacccttgaatattgcattgtattatctggttgcatttcacaacacaacccaactctccattgaactcatcaactttgctgtatttcttaacacaatacaaagaaagcgagata

SEQ ID NO: 24169 - DNA, 770 bp, synthetic construct
  source 1..770: mol_type = other DNA
tactctggttcgtttagaacccttgtacgcctgtttttcccccccttaaataaattaagatctctgccaatgtggggagtagtccgactccgcaccgatacgtcgcaccaacagaccggttcgcctaggacccttctgcggattggtatgagtcccccccccgaaacttagaagcacattacaaactggccaataggagcgtggtatccaaccgcgttgcggtcaagcacttctgtttccccggtcagaaatgatcgttacccgccctccccactacgagaagcctattaaccactgaaagtgatgatgagttgcgctcagccacaaccccggtggtagctctgagagatggggctcgcaccacccccgtggtgacacggttgcttgcccgcgtgtgctctcgggttcagtcgcgagactgttcactctgactcattgtaggtggccaagagcctattgtgctggggaggttttcctccggagccgtgaatgctgctaatcccaacctccgagcgtgtgcgcacaatccagtgttgctacgtcgtaacgcgtaagttggaggcggaacagactactttcggtactccgtgtttccttaattttattgttcaaatttatggtgacattgtctgacatttgtgaattcgctcgcctgccacttaatatcgctttatatcatctgatagcattccataagactacagaactcactttggaactcatcgactttgctgttttcctgaatactgttcacaaccaaacaaaacaaa

SEQ ID NO: 24170 - DNA, 720 bp, synthetic construct
  source 1..720: mol_type = other DNA
taaattaagatctctgccaatgtggggagtagtccgactccgcaccgatacgtcgcaccaacagaccggttcgcctaggacccttctgcggattggtatgagtcccccccccgaaacttagaagcacattacaaactggccaataggagcgtggtatccaaccgcgttgcggtcaagcacttctgtttccccggtcagaaatgatcgttacccgccctccccactacgagaagcctattaaccactgaaagtgatgatgagttgcgctcagccacaaccccggtggtagctctgagagatggggctcgcaccacccccgtggtgacacggttgcttgcccgcgtgtgctctcgggttcagtcgcgagactgttcactctgactcattgtaggtggccaagagcctattgtgctggggaggttttcctccggagccgtgaatgctgctaatcccaacctccgagcgtgtgcgcacaatccagtgttgctacgtcgtaacgcgtaagttggaggcggaacagactactttcggtactccgtgtttccttaattttattgttcaaatttatggtgacattgtctgacatttgtgaattcgctcgcctgccacttaatatcgctttatatcatctgatagcattccataagactacagaactcactttggaactcatcgactttgctgttttcctgaatactgttcacaaccaaacaaaacaaa

SEQ ID NO: 24171 - DNA, 670 bp, synthetic construct
  source 1..670: mol_type = other DNA
cgtcgcaccaacagaccggttcgcctaggacccttctgcggattggtatgagtcccccccccgaaacttagaagcacattacaaactggccaataggagcgtggtatccaaccgcgttgcggtcaagcacttctgtttccccggtcagaaatgatcgttacccgccctccccactacgagaagcctattaaccactgaaagtgatgatgagttgcgctcagccacaaccccggtggtagctctgagagatggggctcgcaccacccccgtggtgacacggttgcttgcccgcgtgtgctctcgggttcagtcgcgagactgttcactctgactcattgtaggtggccaagagcctattgtgctggggaggttttcctccggagccgtgaatgctgctaatcccaacctccgagcgtgtgcgcacaatccagtgttgctacgtcgtaacgcgtaagttggaggcggaacagactactttcggtactccgtgtttccttaattttattgttcaaatttatggtgacattgtctgacatttgtgaattcgctcgcctgccacttaatatcgctttatatcatctgatagcattccataagactacagaactcactttggaactcatcgactttgctgttttcctgaatactgttcacaaccaaacaaaacaaa

SEQ ID NO: 24172 - DNA, 620 bp, synthetic construct
  source 1..620: mol_type = other DNA
agtcccccccccgaaacttagaagcacattacaaactggccaataggagcgtggtatccaaccgcgttgcggtcaagcacttctgtttccccggtcagaaatgatcgttacccgccctccccactacgagaagcctattaaccactgaaagtgatgatgagttgcgctcagccacaaccccggtggtagctctgagagatggggctcgcaccacccccgtggtgacacggttgcttgcccgcgtgtgctctcgggttcagtcgcgagactgttcactctgactcattgtaggtggccaagagcctattgtgctggggaggttttcctccggagccgtgaatgctgctaatcccaacctccgagcgtgtgcgcacaatccagtgttgctacgtcgtaacgcgtaagttggaggcggaacagactactttcggtactccgtgtttccttaattttattgttcaaatttatggtgacattgtctgacatttgtgaattcgctcgcctgccacttaatatcgctttatatcatctgatagcattccataagactacagaactcactttggaactcatcgactttgctgttttcctgaatactgttcacaaccaaacaaaacaaa

SEQ ID NO: 24173 - DNA, 570 bp, synthetic construct
  source 1..570: mol_type = other DNA
gtggtatccaaccgcgttgcggtcaagcacttctgtttccccggtcagaaatgatcgttacccgccctccccactacgagaagcctattaaccactgaaagtgatgatgagttgcgctcagccacaaccccggtggtagctctgagagatggggctcgcaccacccccgtggtgacacggttgcttgcccgcgtgtgctctcgggttcagtcgcgagactgttcactctgactcattgtaggtggccaagagcctattgtgctggggaggttttcctccggagccgtgaatgctgctaatcccaacctccgagcgtgtgcgcacaatccagtgttgctacgtcgtaacgcgtaagttggaggcggaacagactactttcggtactccgtgtttccttaattttattgttcaaatttatggtgacattgtctgacatttgtgaattcgctcgcctgccacttaatatcgctttatatcatctgatagcattccataagactacagaactcactttggaactcatcgactttgctgttttcctgaatactgttcacaaccaaacaaaacaaa

SEQ ID NO: 24174 - DNA, 520 bp, synthetic construct
  source 1..520: mol_type = other DNA
atgatcgttacccgccctccccactacgagaagcctattaaccactgaaagtgatgatgagttgcgctcagccacaaccccggtggtagctctgagagatggggctcgcaccacccccgtggtgacacggttgcttgcccgcgtgtgctctcgggttcagtcgcgagactgttcactctgactcattgtaggtggccaagagcctattgtgctggggaggttttcctccggagccgtgaatgctgctaatcccaacctccgagcgtgtgcgcacaatccagtgttgctacgtcgtaacgcgtaagttggaggcggaacagactactttcggtactccgtgtttccttaattttattgttcaaatttatggtgacattgtctgacatttgtgaattcgctcgcctgccacttaatatcgctttatatcatctgatagcattccataagactacagaactcactttggaactcatcgactttgctgttttcctgaatactgttcacaaccaaacaaaacaaa

SEQ ID NO: 24175 - DNA, 771 bp, synthetic construct
  source 1..771: mol_type = other DNA
tactctggtacgttagtacctttgtacgcctgttttcccctcccttaaacaaattaagattaccactactgaggggagtagtccgactccgctccggtactgccgcaccagtactccggtacacttagtaccctagtacggagtagatggtatccccaccccgcaacttagaagcatgcaaacaaaccgaccaataggcgcacgatatccagtcgtgtttcggtcaagcacttctgtctccccggtccgaaaggatcgttacccgcccgacccactacgagaagcccagtaactggccaagtgattgcgaagttgcgctcagccacaaccccagtggtagctctggaagatggggctcgcgtctcccccgtggtgacacggtcgcttgcccgcgtgtgcttccgggttcggcctacgccgttcacttcaatgtcacgtaaccagccaagagcctattgtgctgggacggttttcctccggggccgtgaatgctgctaatcccaacctccgagcgtgtgcgcacaacccagtgttgctacgtcgtaatgcgtaagttggaggcggaacagactactttcggtaccccgtgtttcctttaaattttattcattattttatggtgacaattgctgagatctgcgaattagcgactctgccgttgaatattgctctgtactatttggttgcattccacaaaacctctgacatccccagtacatacattactttacttgtttacctcaatctaaagcacaagctagataatacaaa

SEQ ID NO: 24176 - DNA, 721 bp, synthetic construct
  source 1..721: mol_type = other DNA
aaattaagattaccactactgaggggagtagtccgactccgctccggtactgccgcaccagtactccggtacacttagtaccctagtacggagtagatggtatccccaccccgcaacttagaagcatgcaaacaaaccgaccaataggcgcacgatatccagtcgtgtttcggtcaagcacttctgtctccccggtccgaaaggatcgttacccgcccgacccactacgagaagcccagtaactggccaagtgattgcgaagttgcgctcagccacaaccccagtggtagctctggaagatggggctcgcgtctcccccgtggtgacacggtcgcttgcccgcgtgtgcttccgggttcggcctacgccgttcacttcaatgtcacgtaaccagccaagagcctattgtgctgggacggttttcctccggggccgtgaatgctgctaatcccaacctccgagcgtgtgcgcacaacccagtgttgctacgtcgtaatgcgtaagttggaggcggaacagactactttcggtaccccgtgtttcctttaaattttattcattattttatggtgacaattgctgagatctgcgaattagcgactctgccgttgaatattgctctgtactatttggttgcattccacaaaacctctgacatccccagtacatacattactttacttgtttacctcaatctaaagcacaagctagataatacaaa

SEQ ID NO: 24177 - DNA, 671 bp, synthetic construct
  source 1..671: mol_type = other DNA
tgccgcaccagtactccggtacacttagtaccctagtacggagtagatggtatccccaccccgcaacttagaagcatgcaaacaaaccgaccaataggcgcacgatatccagtcgtgtttcggtcaagcacttctgtctccccggtccgaaaggatcgttacccgcccgacccactacgagaagcccagtaactggccaagtgattgcgaagttgcgctcagccacaaccccagtggtagctctggaagatggggctcgcgtctcccccgtggtgacacggtcgcttgcccgcgtgtgcttccgggttcggcctacgccgttcacttcaatgtcacgtaaccagccaagagcctattgtgctgggacggttttcctccggggccgtgaatgctgctaatcccaacctccgagcgtgtgcgcacaacccagtgttgctacgtcgtaatgcgtaagttggaggcggaacagactactttcggtaccccgtgtttcctttaaattttattcattattttatggtgacaattgctgagatctgcgaattagcgactctgccgttgaatattgctctgtactatttggttgcattccacaaaacctctgacatccccagtacatacattactttacttgtttacctcaatctaaagcacaagctagataatacaaa

SEQ ID NO: 24178 - DNA, 621 bp, synthetic construct
  source 1..621: mol_type = other DNA
tatccccaccccgcaacttagaagcatgcaaacaaaccgaccaataggcgcacgatatccagtcgtgtttcggtcaagcacttctgtctccccggtccgaaaggatcgttacccgcccgacccactacgagaagcccagtaactggccaagtgattgcgaagttgcgctcagccacaaccccagtggtagctctggaagatggggctcgcgtctcccccgtggtgacacggtcgcttgcccgcgtgtgcttccgggttcggcctacgccgttcacttcaatgtcacgtaaccagccaagagcctattgtgctgggacggttttcctccggggccgtgaatgctgctaatcccaacctccgagcgtgtgcgcacaacccagtgttgctacgtcgtaatgcgtaagttggaggcggaacagactactttcggtaccccgtgtttcctttaaattttattcattattttatggtgacaattgctgagatctgcgaattagcgactctgccgttgaatattgctctgtactatttggttgcattccacaaaacctctgacatccccagtacatacattactttacttgtttacctcaatctaaagcacaagctagataatacaaa

SEQ ID NO: 24179 - DNA, 571 bp, synthetic construct
  source 1..571: mol_type = other DNA
cacgatatccagtcgtgtttcggtcaagcacttctgtctccccggtccgaaaggatcgttacccgcccgacccactacgagaagcccagtaactggccaagtgattgcgaagttgcgctcagccacaaccccagtggtagctctggaagatggggctcgcgtctcccccgtggtgacacggtcgcttgcccgcgtgtgcttccgggttcggcctacgccgttcacttcaatgtcacgtaaccagccaagagcctattgtgctgggacggttttcctccggggccgtgaatgctgctaatcccaacctccgagcgtgtgcgcacaacccagtgttgctacgtcgtaatgcgtaagttggaggcggaacagactactttcggtaccccgtgtttcctttaaattttattcattattttatggtgacaattgctgagatctgcgaattagcgactctgccgttgaatattgctctgtactatttggttgcattccacaaaacctctgacatccccagtacatacattactttacttgtttacctcaatctaaagcacaagctagataatacaaa

SEQ ID NO: 24180 - DNA, 521 bp, synthetic construct
  source 1..521: mol_type = other DNA
aaggatcgttacccgcccgacccactacgagaagcccagtaactggccaagtgattgcgaagttgcgctcagccacaaccccagtggtagctctggaagatggggctcgcgtctcccccgtggtgacacggtcgcttgcccgcgtgtgcttccgggttcggcctacgccgttcacttcaatgtcacgtaaccagccaagagcctattgtgctgggacggttttcctccggggccgtgaatgctgctaatcccaacctccgagcgtgtgcgcacaacccagtgttgctacgtcgtaatgcgtaagttggaggcggaacagactactttcggtaccccgtgtttcctttaaattttattcattattttatggtgacaattgctgagatctgcgaattagcgactctgccgttgaatattgctctgtactatttggttgcattccacaaaacctctgacatccccagtacatacattactttacttgtttacctcaatctaaagcacaagctagataatacaaa

SEQ ID NO: 24181 - DNA, 772 bp, synthetic construct
  source 1..772: mol_type = other DNA
catgtggtactgtggtatcgcggtaccacagtacgcctctttgaccgccctgacccaagaatcttttcctttaacagatctcttcgtaacaagggcctcagcctgacgcaagtgcctccattggagtctctccaagccctccggggcttggagggcgccgaccccctgcctagggggagcccacgacacggctggagtccattggcacaccgcagccacgattcaagccagaattgaaagcgggaagcacttctgtctccccggtgtggatcatacgctgtacccacggcgaaaagtgaagcatcgttacccgactcggtacttcgagaagcccagtacagttgtggatctctgcagggtatacgctcagcgtgacccctacgtagttccttgagatggctgagagaacaccccacgggcgaccgtgtctctcggcgcgtggctcaaggccgggccttcagtggctcggtgccttgcagagtgaagcctccgaacagcctattgagctaccgtttagcctccgccctcttgaatgcggctaatcctaaccatggagcgcccgcccacagtccagtgggtagagcgtcgtaacgcgcaagtccgtggcggaaccgactactttagagtggcgtgtttccaatttatcctttataaagttgcttatggtgacaccacaagagatccacgatttcttgtttcttatcactgagacacaagtcatattcatcaatctttattgcggaattaacttggtgcgtccaaacacatcagc

SEQ ID NO: 24182 - DNA, 722 bp, synthetic construct
  source 1..722: mol_type = other DNA
tgacccaagaatcttttcctttaacagatctcttcgtaacaagggcctcagcctgacgcaagtgcctccattggagtctctccaagccctccggggcttggagggcgccgaccccctgcctagggggagcccacgacacggctggagtccattggcacaccgcagccacgattcaagccagaattgaaagcgggaagcacttctgtctccccggtgtggatcatacgctgtacccacggcgaaaagtgaagcatcgttacccgactcggtacttcgagaagcccagtacagttgtggatctctgcagggtatacgctcagcgtgacccctacgtagttccttgagatggctgagagaacaccccacgggcgaccgtgtctctcggcgcgtggctcaaggccgggccttcagtggctcggtgccttgcagagtgaagcctccgaacagcctattgagctaccgtttagcctccgccctcttgaatgcggctaatcctaaccatggagcgcccgcccacagtccagtgggtagagcgtcgtaacgcgcaagtccgtggcggaaccgactactttagagtggcgtgtttccaatttatcctttataaagttgcttatggtgacaccacaagagatccacgatttcttgtttcttatcactgagacacaagtcatattcatcaatctttattgcggaattaacttggtgcgtccaaacacatcagc

SEQ ID NO: 24183 - DNA, 672 bp, synthetic construct
  source 1..672: mol_type = other DNA
gcctgacgcaagtgcctccattggagtctctccaagccctccggggcttggagggcgccgaccccctgcctagggggagcccacgacacggctggagtccattggcacaccgcagccacgattcaagccagaattgaaagcgggaagcacttctgtctccccggtgtggatcatacgctgtacccacggcgaaaagtgaagcatcgttacccgactcggtacttcgagaagcccagtacagttgtggatctctgcagggtatacgctcagcgtgacccctacgtagttccttgagatggctgagagaacaccccacgggcgaccgtgtctctcggcgcgtggctcaaggccgggccttcagtggctcggtgccttgcagagtgaagcctccgaacagcctattgagctaccgtttagcctccgccctcttgaatgcggctaatcctaaccatggagcgcccgcccacagtccagtgggtagagcgtcgtaacgcgcaagtccgtggcggaaccgactactttagagtggcgtgtttccaatttatcctttataaagttgcttatggtgacaccacaagagatccacgatttcttgtttcttatcactgagacacaagtcatattcatcaatctttattgcggaattaacttggtgcgtccaaacacatcagc

SEQ ID NO: 24184 - DNA, 622 bp, synthetic construct
  source 1..622: mol_type = other DNA
gagggcgccgaccccctgcctagggggagcccacgacacggctggagtccattggcacaccgcagccacgattcaagccagaattgaaagcgggaagcacttctgtctccccggtgtggatcatacgctgtacccacggcgaaaagtgaagcatcgttacccgactcggtacttcgagaagcccagtacagttgtggatctctgcagggtatacgctcagcgtgacccctacgtagttccttgagatggctgagagaacaccccacgggcgaccgtgtctctcggcgcgtggctcaaggccgggccttcagtggctcggtgccttgcagagtgaagcctccgaacagcctattgagctaccgtttagcctccgccctcttgaatgcggctaatcctaaccatggagcgcccgcccacagtccagtgggtagagcgtcgtaacgcgcaagtccgtggcggaaccgactactttagagtggcgtgtttccaatttatcctttataaagttgcttatggtgacaccacaagagatccacgatttcttgtttcttatcactgagacacaagtcatattcatcaatctttattgcggaattaacttggtgcgtccaaacacatcagc

SEQ ID NO: 24185 - DNA, 572 bp, synthetic construct
  source 1..572: mol_type = other DNA
attggcacaccgcagccacgattcaagccagaattgaaagcgggaagcacttctgtctccccggtgtggatcatacgctgtacccacggcgaaaagtgaagcatcgttacccgactcggtacttcgagaagcccagtacagttgtggatctctgcagggtatacgctcagcgtgacccctacgtagttccttgagatggctgagagaacaccccacgggcgaccgtgtctctcggcgcgtggctcaaggccgggccttcagtggctcggtgccttgcagagtgaagcctccgaacagcctattgagctaccgtttagcctccgccctcttgaatgcggctaatcctaaccatggagcgcccgcccacagtccagtgggtagagcgtcgtaacgcgcaagtccgtggcggaaccgactactttagagtggcgtgtttccaatttatcctttataaagttgcttatggtgacaccacaagagatccacgatttcttgtttcttatcactgagacacaagtcatattcatcaatctttattgcggaattaacttggtgcgtccaaacacatcagc

SEQ ID NO: 24186 - DNA, 522 bp, synthetic construct
  source 1..522: mol_type = other DNA
ttctgtctccccggtgtggatcatacgctgtacccacggcgaaaagtgaagcatcgttacccgactcggtacttcgagaagcccagtacagttgtggatctctgcagggtatacgctcagcgtgacccctacgtagttccttgagatggctgagagaacaccccacgggcgaccgtgtctctcggcgcgtggctcaaggccgggccttcagtggctcggtgccttgcagagtgaagcctccgaacagcctattgagctaccgtttagcctccgccctcttgaatgcggctaatcctaaccatggagcgcccgcccacagtccagtgggtagagcgtcgtaacgcgcaagtccgtggcggaaccgactactttagagtggcgtgtttccaatttatcctttataaagttgcttatggtgacaccacaagagatccacgatttcttgtttcttatcactgagacacaagtcatattcatcaatctttattgcggaattaacttggtgcgtccaaacacatcagc

SEQ ID NO: 24187 - DNA, 772 bp, synthetic construct
  source 1..772: mol_type = other DNA
gtactctggtacgccagtacctttgtacgcctgttttcccctcccttaaataaattaagattgccactactgaggggagtagtccgactccgctccagcaatgctgcaccagtgcactggtacgccagtaccttttcacggagtagatggcatccccaccccgaaacgtagaagcatgcaaacaaaccgaccaccaggcgcgcggcatccaaccgcgttacggtcaagcacttctgtttccccggtccgcaaggatcgttacccgcccgacccactacgagaagcccagtaactggccaagtggtcgcgaggttgcactcagccacaaccccagtggtagctctggaagatggggctcgcagttcccccgtggtaacacggttgcctgcccgcgcgtgcttccgggttcggctctcgccgttcacctcaaccccacgtaaccagccaagagcctattgtgctgggacggtattcctccggggccgtgaatgctgctaatcccaacctccgagcgtgtgcgcacaatccagtgttgctacgtcgtaatgcgtaagttggaggcggaacagactactttcggtaccccgtgtttcctttatttttccttcaaaaattttatggtgacaattgttgagatttgcgatttggccactttaccattgaatattgccttgtattacttggttgcttttcacagaacctctgacatacccagttcgtatattgatcttcttgtttatttaaacctaaaacacaaacttagaaagctaag

SEQ ID NO: 24188 - DNA, 722 bp, synthetic construct
  source 1..722: mol_type = other DNA
taaattaagattgccactactgaggggagtagtccgactccgctccagcaatgctgcaccagtgcactggtacgccagtaccttttcacggagtagatggcatccccaccccgaaacgtagaagcatgcaaacaaaccgaccaccaggcgcgcggcatccaaccgcgttacggtcaagcacttctgtttccccggtccgcaaggatcgttacccgcccgacccactacgagaagcccagtaactggccaagtggtcgcgaggttgcactcagccacaaccccagtggtagctctggaagatggggctcgcagttcccccgtggtaacacggttgcctgcccgcgcgtgcttccgggttcggctctcgccgttcacctcaaccccacgtaaccagccaagagcctattgtgctgggacggtattcctccggggccgtgaatgctgctaatcccaacctccgagcgtgtgcgcacaatccagtgttgctacgtcgtaatgcgtaagttggaggcggaacagactactttcggtaccccgtgtttcctttatttttccttcaaaaattttatggtgacaattgttgagatttgcgatttggccactttaccattgaatattgccttgtattacttggttgcttttcacagaacctctgacatacccagttcgtatattgatcttcttgtttatttaaacctaaaacacaaacttagaaagctaag

SEQ ID NO: 24189 - DNA, 672 bp, synthetic construct
  source 1..672: mol_type = other DNA
atgctgcaccagtgcactggtacgccagtaccttttcacggagtagatggcatccccaccccgaaacgtagaagcatgcaaacaaaccgaccaccaggcgcgcggcatccaaccgcgttacggtcaagcacttctgtttccccggtccgcaaggatcgttacccgcccgacccactacgagaagcccagtaactggccaagtggtcgcgaggttgcactcagccacaaccccagtggtagctctggaagatggggctcgcagttcccccgtggtaacacggttgcctgcccgcgcgtgcttccgggttcggctctcgccgttcacctcaaccccacgtaaccagccaagagcctattgtgctgggacggtattcctccggggccgtgaatgctgctaatcccaacctccgagcgtgtgcgcacaatccagtgttgctacgtcgtaatgcgtaagttggaggcggaacagactactttcggtaccccgtgtttcctttatttttccttcaaaaattttatggtgacaattgttgagatttgcgatttggccactttaccattgaatattgccttgtattacttggttgcttttcacagaacctctgacatacccagttcgtatattgatcttcttgtttatttaaacctaaaacacaaacttagaaagctaag

SEQ ID NO: 24190 - DNA, 622 bp, synthetic construct
  source 1..622: mol_type = other DNA
catccccaccccgaaacgtagaagcatgcaaacaaaccgaccaccaggcgcgcggcatccaaccgcgttacggtcaagcacttctgtttccccggtccgcaaggatcgttacccgcccgacccactacgagaagcccagtaactggccaagtggtcgcgaggttgcactcagccacaaccccagtggtagctctggaagatggggctcgcagttcccccgtggtaacacggttgcctgcccgcgcgtgcttccgggttcggctctcgccgttcacctcaaccccacgtaaccagccaagagcctattgtgctgggacggtattcctccggggccgtgaatgctgctaatcccaacctccgagcgtgtgcgcacaatccagtgttgctacgtcgtaatgcgtaagttggaggcggaacagactactttcggtaccccgtgtttcctttatttttccttcaaaaattttatggtgacaattgttgagatttgcgatttggccactttaccattgaatattgccttgtattacttggttgcttttcacagaacctctgacatacccagttcgtatattgatcttcttgtttatttaaacctaaaacacaaacttagaaagctaag

SEQ ID NO: 24191 - DNA, 572 bp, synthetic construct
  source 1..572: mol_type = other DNA
cgcggcatccaaccgcgttacggtcaagcacttctgtttccccggtccgcaaggatcgttacccgcccgacccactacgagaagcccagtaactggccaagtggtcgcgaggttgcactcagccacaaccccagtggtagctctggaagatggggctcgcagttcccccgtggtaacacggttgcctgcccgcgcgtgcttccgggttcggctctcgccgttcacctcaaccccacgtaaccagccaagagcctattgtgctgggacggtattcctccggggccgtgaatgctgctaatcccaacctccgagcgtgtgcgcacaatccagtgttgctacgtcgtaatgcgtaagttggaggcggaacagactactttcggtaccccgtgtttcctttatttttccttcaaaaattttatggtgacaattgttgagatttgcgatttggccactttaccattgaatattgccttgtattacttggttgcttttcacagaacctctgacatacccagttcgtatattgatcttcttgtttatttaaacctaaaacacaaacttagaaagctaag

SEQ ID NO: 24192 - DNA, 522 bp, synthetic construct
  source 1..522: mol_type = other DNA
aaggatcgttacccgcccgacccactacgagaagcccagtaactggccaagtggtcgcgaggttgcactcagccacaaccccagtggtagctctggaagatggggctcgcagttcccccgtggtaacacggttgcctgcccgcgcgtgcttccgggttcggctctcgccgttcacctcaaccccacgtaaccagccaagagcctattgtgctgggacggtattcctccggggccgtgaatgctgctaatcccaacctccgagcgtgtgcgcacaatccagtgttgctacgtcgtaatgcgtaagttggaggcggaacagactactttcggtaccccgtgtttcctttatttttccttcaaaaattttatggtgacaattgttgagatttgcgatttggccactttaccattgaatattgccttgtattacttggttgcttttcacagaacctctgacatacccagttcgtatattgatcttcttgtttatttaaacctaaaacacaaacttagaaagctaag

SEQ ID NO: 24193 - DNA, 772 bp, synthetic construct
  source 1..772: mol_type = other DNA
tactctggtacgctagtacctttgtacgcctgtttttcccctcccttaaataaatcaaggttgccactactgaggggagtagtccgactccgctccagcaatgctgcaccagtgcactggtacgctagtaccttttcacggagtagatggtatcccttaccccggaacctagaagattgcacacaaaccgaccaataggcgcaccgcatccagccgtgcagcggtcaagcacttctgtctccccggtctgtaaagatcgttatccgcccgacccactacgaaaagcctagtaactggccaagtgaacgcgaagttgcgctccgccacaaccccagtggtagctctggaagatggggctcgcaccacccccgtggtaacacggttgcctgcccgcgtgtgcttccgggttcggtctcgtgccgttcacttcaacttcacgcaaccagccaagagcctattgtgctgggacggttttcctccggggccgtgaatgctgctaatcccaacctccgagcgtgtgcgcacaatccagtgttgctacgtcgtaacgcgtaagttggaggcggaacagactactttcggtaccccgtgtttcctctcattttatttaatattttatggtgacaattgttgagatttgcgctcttgcaacgttgccattgaatattggcttatactatttggttgccttttacaaaacctctgatatacccagttcttacattgatctgcttgtttttctcaatttgaagtatagactacaaatagcaaa

SEQ ID NO: 24194 - DNA, 722 bp, synthetic construct
  source 1..722: mol_type = other DNA
taaatcaaggttgccactactgaggggagtagtccgactccgctccagcaatgctgcaccagtgcactggtacgctagtaccttttcacggagtagatggtatcccttaccccggaacctagaagattgcacacaaaccgaccaataggcgcaccgcatccagccgtgcagcggtcaagcacttctgtctccccggtctgtaaagatcgttatccgcccgacccactacgaaaagcctagtaactggccaagtgaacgcgaagttgcgctccgccacaaccccagtggtagctctggaagatggggctcgcaccacccccgtggtaacacggttgcctgcccgcgtgtgcttccgggttcggtctcgtgccgttcacttcaacttcacgcaaccagccaagagcctattgtgctgggacggttttcctccggggccgtgaatgctgctaatcccaacctccgagcgtgtgcgcacaatccagtgttgctacgtcgtaacgcgtaagttggaggcggaacagactactttcggtaccccgtgtttcctctcattttatttaatattttatggtgacaattgttgagatttgcgctcttgcaacgttgccattgaatattggcttatactatttggttgccttttacaaaacctctgatatacccagttcttacattgatctgcttgtttttctcaatttgaagtatagactacaaatagcaaa

SEQ ID NO: 24195 - DNA, 672 bp, synthetic construct
  source 1..672: mol_type = other DNA
atgctgcaccagtgcactggtacgctagtaccttttcacggagtagatggtatcccttaccccggaacctagaagattgcacacaaaccgaccaataggcgcaccgcatccagccgtgcagcggtcaagcacttctgtctccccggtctgtaaagatcgttatccgcccgacccactacgaaaagcctagtaactggccaagtgaacgcgaagttgcgctccgccacaaccccagtggtagctctggaagatggggctcgcaccacccccgtggtaacacggttgcctgcccgcgtgtgcttccgggttcggtctcgtgccgttcacttcaacttcacgcaaccagccaagagcctattgtgctgggacggttttcctccggggccgtgaatgctgctaatcccaacctccgagcgtgtgcgcacaatccagtgttgctacgtcgtaacgcgtaagttggaggcggaacagactactttcggtaccccgtgtttcctctcattttatttaatattttatggtgacaattgttgagatttgcgctcttgcaacgttgccattgaatattggcttatactatttggttgccttttacaaaacctctgatatacccagttcttacattgatctgcttgtttttctcaatttgaagtatagactacaaatagcaaa

SEQ ID NO: 24196 - DNA, 622 bp, synthetic construct
  source 1..622: mol_type = other DNA
tatcccttaccccggaacctagaagattgcacacaaaccgaccaataggcgcaccgcatccagccgtgcagcggtcaagcacttctgtctccccggtctgtaaagatcgttatccgcccgacccactacgaaaagcctagtaactggccaagtgaacgcgaagttgcgctccgccacaaccccagtggtagctctggaagatggggctcgcaccacccccgtggtaacacggttgcctgcccgcgtgtgcttccgggttcggtctcgtgccgttcacttcaacttcacgcaaccagccaagagcctattgtgctgggacggttttcctccggggccgtgaatgctgctaatcccaacctccgagcgtgtgcgcacaatccagtgttgctacgtcgtaacgcgtaagttggaggcggaacagactactttcggtaccccgtgtttcctctcattttatttaatattttatggtgacaattgttgagatttgcgctcttgcaacgttgccattgaatattggcttatactatttggttgccttttacaaaacctctgatatacccagttcttacattgatctgcttgtttttctcaatttgaagtatagactacaaatagcaaa

SEQ ID NO: 24197 - DNA, 572 bp, synthetic construct
  source 1..572: mol_type = other DNA
gcaccgcatccagccgtgcagcggtcaagcacttctgtctccccggtctgtaaagatcgttatccgcccgacccactacgaaaagcctagtaactggccaagtgaacgcgaagttgcgctccgccacaaccccagtggtagctctggaagatggggctcgcaccacccccgtggtaacacggttgcctgcccgcgtgtgcttccgggttcggtctcgtgccgttcacttcaacttcacgcaaccagccaagagcctattgtgctgggacggttttcctccggggccgtgaatgctgctaatcccaacctccgagcgtgtgcgcacaatccagtgttgctacgtcgtaacgcgtaagttggaggcggaacagactactttcggtaccccgtgtttcctctcattttatttaatattttatggtgacaattgttgagatttgcgctcttgcaacgttgccattgaatattggcttatactatttggttgccttttacaaaacctctgatatacccagttcttacattgatctgcttgtttttctcaatttgaagtatagactacaaatagcaaa

SEQ ID NO: 24198 - DNA, 522 bp, synthetic construct
  source 1..522: mol_type = other DNA
taaagatcgttatccgcccgacccactacgaaaagcctagtaactggccaagtgaacgcgaagttgcgctccgccacaaccccagtggtagctctggaagatggggctcgcaccacccccgtggtaacacggttgcctgcccgcgtgtgcttccgggttcggtctcgtgccgttcacttcaacttcacgcaaccagccaagagcctattgtgctgggacggttttcctccggggccgtgaatgctgctaatcccaacctccgagcgtgtgcgcacaatccagtgttgctacgtcgtaacgcgtaagttggaggcggaacagactactttcggtaccccgtgtttcctctcattttatttaatattttatggtgacaattgttgagatttgcgctcttgcaacgttgccattgaatattggcttatactatttggttgccttttacaaaacctctgatatacccagttcttacattgatctgcttgtttttctcaatttgaagtatagactacaaatagcaaa

SEQ ID NO: 24199 - DNA, 772 bp, synthetic construct
  source 1..772: mol_type = other DNA
gtactctggtacattagtacctttgtacgcctgttttcccctcccttaaataaatcaagattaccactactgaggggagtagtccgactccgctccagcaatgctgcaccagtgcactggtacgctagtaccttttcacggagtagatggtatccccaccccgaaacttagaagcatgtgatcaaatcgaccaataggcgcgcggttgccagccgcgtttcggtcaagcacttctgtttccccggtccgcaaggatcgttacccgcccgacccactgcgagaagcccagtaactggccaagcggtagcgaggttgcactcagccacaaccccagtggtagctctggaagatggggctcgcagttcccccgtggtaacacggatgcctgcccgcgtgtgcttccgggttcggtctcgtgccgttcacctcaataccgcgtaaccagtgaagagcctattgcgctgggacggttttcctccggggccgtgaatgctgctaatcctaacctctgagcgtgtgcgcacaatccagtgttgctacgtcgtaacgcgtaagtcaggggcggaacagactactttcggtaccccgtgtttccttttattttatatttatcattttatggtgacaattgctgagatttgcgatttagcggttttgccattgaacattgctttgtactacttggttgcatttcacaaaacctccgacatacccagctcctacatcgacttgcttgtttttcttaattaagacataaactagagaacacaaa

SEQ ID NO: 24200 - DNA, 722 bp, synthetic construct
  source 1..722: mol_type = other DNA
taaatcaagattaccactactgaggggagtagtccgactccgctccagcaatgctgcaccagtgcactggtacgctagtaccttttcacggagtagatggtatccccaccccgaaacttagaagcatgtgatcaaatcgaccaataggcgcgcggttgccagccgcgtttcggtcaagcacttctgtttccccggtccgcaaggatcgttacccgcccgacccactgcgagaagcccagtaactggccaagcggtagcgaggttgcactcagccacaaccccagtggtagctctggaagatggggctcgcagttcccccgtggtaacacggatgcctgcccgcgtgtgcttccgggttcggtctcgtgccgttcacctcaataccgcgtaaccagtgaagagcctattgcgctgggacggttttcctccggggccgtgaatgctgctaatcctaacctctgagcgtgtgcgcacaatccagtgttgctacgtcgtaacgcgtaagtcaggggcggaacagactactttcggtaccccgtgtttccttttattttatatttatcattttatggtgacaattgctgagatttgcgatttagcggttttgccattgaacattgctttgtactacttggttgcatttcacaaaacctccgacatacccagctcctacatcgacttgcttgtttttcttaattaagacataaactagagaacacaaa

SEQ ID NO: 24201 - DNA, 672 bp, synthetic construct
  source 1..672: mol_type = other DNA
atgctgcaccagtgcactggtacgctagtaccttttcacggagtagatggtatccccaccccgaaacttagaagcatgtgatcaaatcgaccaataggcgcgcggttgccagccgcgtttcggtcaagcacttctgtttccccggtccgcaaggatcgttacccgcccgacccactgcgagaagcccagtaactggccaagcggtagcgaggttgcactcagccacaaccccagtggtagctctggaagatggggctcgcagttcccccgtggtaacacggatgcctgcccgcgtgtgcttccgggttcggtctcgtgccgttcacctcaataccgcgtaaccagtgaagagcctattgcgctgggacggttttcctccggggccgtgaatgctgctaatcctaacctctgagcgtgtgcgcacaatccagtgttgctacgtcgtaacgcgtaagtcaggggcggaacagactactttcggtaccccgtgtttccttttattttatatttatcattttatggtgacaattgctgagatttgcgatttagcggttttgccattgaacattgctttgtactacttggttgcatttcacaaaacctccgacatacccagctcctacatcgacttgcttgtttttcttaattaagacataaactagagaacacaaa

SEQ ID NO: 24202 - DNA, 622 bp, synthetic construct
  source 1..622: mol_type = other DNA
tatccccaccccgaaacttagaagcatgtgatcaaatcgaccaataggcgcgcggttgccagccgcgtttcggtcaagcacttctgtttccccggtccgcaaggatcgttacccgcccgacccactgcgagaagcccagtaactggccaagcggtagcgaggttgcactcagccacaaccccagtggtagctctggaagatggggctcgcagttcccccgtggtaacacggatgcctgcccgcgtgtgcttccgggttcggtctcgtgccgttcacctcaataccgcgtaaccagtgaagagcctattgcgctgggacggttttcctccggggccgtgaatgctgctaatcctaacctctgagcgtgtgcgcacaatccagtgttgctacgtcgtaacgcgtaagtcaggggcggaacagactactttcggtaccccgtgtttccttttattttatatttatcattttatggtgacaattgctgagatttgcgatttagcggttttgccattgaacattgctttgtactacttggttgcatttcacaaaacctccgacatacccagctcctacatcgacttgcttgtttttcttaattaagacataaactagagaacacaaa

SEQ ID NO: 24203 - DNA, 572 bp, synthetic construct
  source 1..572: mol_type = other DNA
cgcggttgccagccgcgtttcggtcaagcacttctgtttccccggtccgcaaggatcgttacccgcccgacccactgcgagaagcccagtaactggccaagcggtagcgaggttgcactcagccacaaccccagtggtagctctggaagatggggctcgcagttcccccgtggtaacacggatgcctgcccgcgtgtgcttccgggttcggtctcgtgccgttcacctcaataccgcgtaaccagtgaagagcctattgcgctgggacggttttcctccggggccgtgaatgctgctaatcctaacctctgagcgtgtgcgcacaatccagtgttgctacgtcgtaacgcgtaagtcaggggcggaacagactactttcggtaccccgtgtttccttttattttatatttatcattttatggtgacaattgctgagatttgcgatttagcggttttgccattgaacattgctttgtactacttggttgcatttcacaaaacctccgacatacccagctcctacatcgacttgcttgtttttcttaattaagacataaactagagaacacaaa

SEQ ID NO: 24204 - DNA, 522 bp, synthetic construct
  source 1..522: mol_type = other DNA
aaggatcgttacccgcccgacccactgcgagaagcccagtaactggccaagcggtagcgaggttgcactcagccacaaccccagtggtagctctggaagatggggctcgcagttcccccgtggtaacacggatgcctgcccgcgtgtgcttccgggttcggtctcgtgccgttcacctcaataccgcgtaaccagtgaagagcctattgcgctgggacggttttcctccggggccgtgaatgctgctaatcctaacctctgagcgtgtgcgcacaatccagtgttgctacgtcgtaacgcgtaagtcaggggcggaacagactactttcggtaccccgtgtttccttttattttatatttatcattttatggtgacaattgctgagatttgcgatttagcggttttgccattgaacattgctttgtactacttggttgcatttcacaaaacctccgacatacccagctcctacatcgacttgcttgtttttcttaattaagacataaactagagaacacaaa

SEQ ID NO: 24205 - DNA, 773 bp, synthetic construct
  source 1..773: mol_type = other DNA
gtactctggtacgttagtacccttgtacgcctgtttttccctcccttaaataaattaagactaccactactgaggggagtagtccgactccgctccggcactgccgcaccagtacaccggtacgctagtacccttgtacggagtagatggtatccccacccccgaaacttagaagcaagcacacaaaccgaccattaggcgcgcggcatccagtcgcgtaacggtcaagcacttctgtttccccggtccgcaaggatcgttacccgcccgacccactacgagaagcctagtagttggccaagtgaacgcgaggttgcgctcagccacaaccccagtggtagctctggaagatggggctcgcacttcccccgtggtaacacggttgcttgcccgcgcgtgcttccgggttcggcttcgtgccgttcacctcaacttcacgtaaccagcaaagagcctattgtgctgggacggttttcctccggggccgtgaatgctgctaatcccaacctccgagcgtgtgcgcacaatccagtgttgctacgtcgtaacgcgtaagttggaggcggaacagactactttcggtaccccgtgtttccttttaattttattcattattttatggtgacaattgctgagatttgtgatttggcgactttaccattgaatattgcattctattaccttatagcatttcacaaaacttctgatattccaccctcctacatcgacctgcttgttttcctgaatctcaaatataaatttgaagagacaaa

SEQ ID NO: 24206 - DNA, 723 bp, synthetic construct
  source 1..723: mol_type = other DNA
taaattaagactaccactactgaggggagtagtccgactccgctccggcactgccgcaccagtacaccggtacgctagtacccttgtacggagtagatggtatccccacccccgaaacttagaagcaagcacacaaaccgaccattaggcgcgcggcatccagtcgcgtaacggtcaagcacttctgtttccccggtccgcaaggatcgttacccgcccgacccactacgagaagcctagtagttggccaagtgaacgcgaggttgcgctcagccacaaccccagtggtagctctggaagatggggctcgcacttcccccgtggtaacacggttgcttgcccgcgcgtgcttccgggttcggcttcgtgccgttcacctcaacttcacgtaaccagcaaagagcctattgtgctgggacggttttcctccggggccgtgaatgctgctaatcccaacctccgagcgtgtgcgcacaatccagtgttgctacgtcgtaacgcgtaagttggaggcggaacagactactttcggtaccccgtgtttccttttaattttattcattattttatggtgacaattgctgagatttgtgatttggcgactttaccattgaatattgcattctattaccttatagcatttcacaaaacttctgatattccaccctcctacatcgacctgcttgttttcctgaatctcaaatataaatttgaagagacaaa

SEQ ID NO: 24207 - DNA, 673 bp, synthetic construct
  source 1..673: mol_type = other DNA
ctgccgcaccagtacaccggtacgctagtacccttgtacggagtagatggtatccccacccccgaaacttagaagcaagcacacaaaccgaccattaggcgcgcggcatccagtcgcgtaacggtcaagcacttctgtttccccggtccgcaaggatcgttacccgcccgacccactacgagaagcctagtagttggccaagtgaacgcgaggttgcgctcagccacaaccccagtggtagctctggaagatggggctcgcacttcccccgtggtaacacggttgcttgcccgcgcgtgcttccgggttcggcttcgtgccgttcacctcaacttcacgtaaccagcaaagagcctattgtgctgggacggttttcctccggggccgtgaatgctgctaatcccaacctccgagcgtgtgcgcacaatccagtgttgctacgtcgtaacgcgtaagttggaggcggaacagactactttcggtaccccgtgtttccttttaattttattcattattttatggtgacaattgctgagatttgtgatttggcgactttaccattgaatattgcattctattaccttatagcatttcacaaaacttctgatattccaccctcctacatcgacctgcttgttttcctgaatctcaaatataaatttgaagagacaaa

SEQ ID NO: 24208 - DNA, 623 bp, synthetic construct
  source 1..623: mol_type = other DNA
tatccccacccccgaaacttagaagcaagcacacaaaccgaccattaggcgcgcggcatccagtcgcgtaacggtcaagcacttctgtttccccggtccgcaaggatcgttacccgcccgacccactacgagaagcctagtagttggccaagtgaacgcgaggttgcgctcagccacaaccccagtggtagctctggaagatggggctcgcacttcccccgtggtaacacggttgcttgcccgcgcgtgcttccgggttcggcttcgtgccgttcacctcaacttcacgtaaccagcaaagagcctattgtgctgggacggttttcctccggggccgtgaatgctgctaatcccaacctccgagcgtgtgcgcacaatccagtgttgctacgtcgtaacgcgtaagttggaggcggaacagactactttcggtaccccgtgtttccttttaattttattcattattttatggtgacaattgctgagatttgtgatttggcgactttaccattgaatattgcattctattaccttatagcatttcacaaaacttctgatattccaccctcctacatcgacctgcttgttttcctgaatctcaaatataaatttgaagagacaaa

SEQ ID NO: 24209 - DNA, 573 bp, synthetic construct
  source 1..573: mol_type = other DNA
gcgcggcatccagtcgcgtaacggtcaagcacttctgtttccccggtccgcaaggatcgttacccgcccgacccactacgagaagcctagtagttggccaagtgaacgcgaggttgcgctcagccacaaccccagtggtagctctggaagatggggctcgcacttcccccgtggtaacacggttgcttgcccgcgcgtgcttccgggttcggcttcgtgccgttcacctcaacttcacgtaaccagcaaagagcctattgtgctgggacggttttcctccggggccgtgaatgctgctaatcccaacctccgagcgtgtgcgcacaatccagtgttgctacgtcgtaacgcgtaagttggaggcggaacagactactttcggtaccccgtgtttccttttaattttattcattattttatggtgacaattgctgagatttgtgatttggcgactttaccattgaatattgcattctattaccttatagcatttcacaaaacttctgatattccaccctcctacatcgacctgcttgttttcctgaatctcaaatataaatttgaagagacaaa

SEQ ID NO: 24210 - DNA, 523 bp, synthetic construct
  source 1..523: mol_type = other DNA
caaggatcgttacccgcccgacccactacgagaagcctagtagttggccaagtgaacgcgaggttgcgctcagccacaaccccagtggtagctctggaagatggggctcgcacttcccccgtggtaacacggttgcttgcccgcgcgtgcttccgggttcggcttcgtgccgttcacctcaacttcacgtaaccagcaaagagcctattgtgctgggacggttttcctccggggccgtgaatgctgctaatcccaacctccgagcgtgtgcgcacaatccagtgttgctacgtcgtaacgcgtaagttggaggcggaacagactactttcggtaccccgtgtttccttttaattttattcattattttatggtgacaattgctgagatttgtgatttggcgactttaccattgaatattgcattctattaccttatagcatttcacaaaacttctgatattccaccctcctacatcgacctgcttgttttcctgaatctcaaatataaatttgaagagacaaa

SEQ ID NO: 24211 - DNA, 780 bp, synthetic construct
  source 1..780: mol_type = other DNA
ctcacctgtcaattgggaccaccactttcagtgaccccatgcgaagtgctgagagaaaggaagctttcttacccttcatttgtgaacccactggtctaagccgcttggaatacgatgagtggaaaagttcattcttaatggagtgaaacatgcttaaatttccagctcgtgctggtctttccagtacggggcggccctgtctggccgtaattcttcagagtgtcacgccacacttgtggatctcacgtgccacatgacagcgctacagctggaactgggtgcttggtgcccatggagtaacagcgaaaagtgttagatcaagccttgcttgggctatgagcctgcggaacaacaactggtaacagttgcctcaggggccgaaagccacggtgttaacagcaccctcatagtttgatccacctcagggtggtgatgtttagcagttagtagttgccaatctgtgttcactgaaatctcggcataccgtgtagtgtacaggggtgaaggatgcccagaaggtacccgtaggtaaccttaagagactatggatctgatctggggccttgtccggagtgctttacacacggctcaaggttaaaaaacgtctagccccacagagcccgagggattcgggttttccctttaaaaacccgactagagcttatggtgacaattattgctgttcagacgaacagtgtaattgttgtctattcacagcagttctatcagagcttttcccacaacggatcttcttggcaagcaaatacagcaggagtcaat

SEQ ID NO: 24212 - DNA, 730 bp, synthetic construct
  source 1..730: mol_type = other DNA
gagagaaaggaagctttcttacccttcatttgtgaacccactggtctaagccgcttggaatacgatgagtggaaaagttcattcttaatggagtgaaacatgcttaaatttccagctcgtgctggtctttccagtacggggcggccctgtctggccgtaattcttcagagtgtcacgccacacttgtggatctcacgtgccacatgacagcgctacagctggaactgggtgcttggtgcccatggagtaacagcgaaaagtgttagatcaagccttgcttgggctatgagcctgcggaacaacaactggtaacagttgcctcaggggccgaaagccacggtgttaacagcaccctcatagtttgatccacctcagggtggtgatgtttagcagttagtagttgccaatctgtgttcactgaaatctcggcataccgtgtagtgtacaggggtgaaggatgcccagaaggtacccgtaggtaaccttaagagactatggatctgatctggggccttgtccggagtgctttacacacggctcaaggttaaaaaacgtctagccccacagagcccgagggattcgggttttccctttaaaaacccgactagagcttatggtgacaattattgctgttcagacgaacagtgtaattgttgtctattcacagcagttctatcagagcttttcccacaacggatcttcttggcaagcaaatacagcaggagtcaat

SEQ ID NO: 24213 - DNA, 680 bp, synthetic construct
  source 1..680: mol_type = other DNA
ccgcttggaatacgatgagtggaaaagttcattcttaatggagtgaaacatgcttaaatttccagctcgtgctggtctttccagtacggggcggccctgtctggccgtaattcttcagagtgtcacgccacacttgtggatctcacgtgccacatgacagcgctacagctggaactgggtgcttggtgcccatggagtaacagcgaaaagtgttagatcaagccttgcttgggctatgagcctgcggaacaacaactggtaacagttgcctcaggggccgaaagccacggtgttaacagcaccctcatagtttgatccacctcagggtggtgatgtttagcagttagtagttgccaatctgtgttcactgaaatctcggcataccgtgtagtgtacaggggtgaaggatgcccagaaggtacccgtaggtaaccttaagagactatggatctgatctggggccttgtccggagtgctttacacacggctcaaggttaaaaaacgtctagccccacagagcccgagggattcgggttttccctttaaaaacccgactagagcttatggtgacaattattgctgttcagacgaacagtgtaattgttgtctattcacagcagttctatcagagcttttcccacaacggatcttcttggcaagcaaatacagcaggagtcaat

SEQ ID NO: 24214 - DNA, 630 bp, synthetic construct
  source 1..630: mol_type = other DNA
tgcttaaatttccagctcgtgctggtctttccagtacggggcggccctgtctggccgtaattcttcagagtgtcacgccacacttgtggatctcacgtgccacatgacagcgctacagctggaactgggtgcttggtgcccatggagtaacagcgaaaagtgttagatcaagccttgcttgggctatgagcctgcggaacaacaactggtaacagttgcctcaggggccgaaagccacggtgttaacagcaccctcatagtttgatccacctcagggtggtgatgtttagcagttagtagttgccaatctgtgttcactgaaatctcggcataccgtgtagtgtacaggggtgaaggatgcccagaaggtacccgtaggtaaccttaagagactatggatctgatctggggccttgtccggagtgctttacacacggctcaaggttaaaaaacgtctagccccacagagcccgagggattcgggttttccctttaaaaacccgactagagcttatggtgacaattattgctgttcagacgaacagtgtaattgttgtctattcacagcagttctatcagagcttttcccacaacggatcttcttggcaagcaaatacagcaggagtcaat

SEQ ID NO: 24215 - DNA, 580 bp, synthetic construct
  source 1..580: mol_type = other DNA
ctggccgtaattcttcagagtgtcacgccacacttgtggatctcacgtgccacatgacagcgctacagctggaactgggtgcttggtgcccatggagtaacagcgaaaagtgttagatcaagccttgcttgggctatgagcctgcggaacaacaactggtaacagttgcctcaggggccgaaagccacggtgttaacagcaccctcatagtttgatccacctcagggtggtgatgtttagcagttagtagttgccaatctgtgttcactgaaatctcggcataccgtgtagtgtacaggggtgaaggatgcccagaaggtacccgtaggtaaccttaagagactatggatctgatctggggccttgtccggagtgctttacacacggctcaaggttaaaaaacgtctagccccacagagcccgagggattcgggttttccctttaaaaacccgactagagcttatggtgacaattattgctgttcagacgaacagtgtaattgttgtctattcacagcagttctatcagagcttttcccacaacggatcttcttggcaagcaaatacagcaggagtcaat

SEQ ID NO: 24216 - DNA, 530 bp, synthetic construct
  source 1..530: mol_type = other DNA
cacatgacagcgctacagctggaactgggtgcttggtgcccatggagtaacagcgaaaagtgttagatcaagccttgcttgggctatgagcctgcggaacaacaactggtaacagttgcctcaggggccgaaagccacggtgttaacagcaccctcatagtttgatccacctcagggtggtgatgtttagcagttagtagttgccaatctgtgttcactgaaatctcggcataccgtgtagtgtacaggggtgaaggatgcccagaaggtacccgtaggtaaccttaagagactatggatctgatctggggccttgtccggagtgctttacacacggctcaaggttaaaaaacgtctagccccacagagcccgagggattcgggttttccctttaaaaacccgactagagcttatggtgacaattattgctgttcagacgaacagtgtaattgttgtctattcacagcagttctatcagagcttttcccacaacggatcttcttggcaagcaaatacagcaggagtcaat

SEQ ID NO: 24217 - DNA, 787 bp, synthetic construct
  source 1..787: mol_type = other DNA
cgtggcgctagtactctggtacgttagtacctttgtacgcctgttttcccctccttaaataaattaagattaccactactgaggggagtagtccgactccgctccagcaatgctgcaccagtgaattggtacgctagtacctctgcacggagtagatggtatccctttccccgaaacttagaagaaagcaaacaaaccgaccaataggagcgcggcaaccagccgtgttgcggtcaagcacttctgtttccccggtccgcaaggatcgttatccgcccgacccactacggaaagcctagtaactggccaaacagcaaagaagttgcgctcggccacaaccccagtggtagctctggaggatggggctcgcatctcccccgtggtaacacggttgcttgcccgcgtgtgcctccgggttcagtcatcgactgttcacttcaatgctgtgtaaccagccaagagcctactgtgctgggacggttttcctccggggccgtgaatgctgctaatcccaacctccgagcgtgtgcgcacaaaccagtgttgctacgtcgtaacgcgtaagtcggaggcggaacagactactttcggtaccccgtgtttcctttgatttttatttaatattttatggtgacaattactgagatttgtgatttggctgctttaccattgaatattgctctgtactatttagtcgcatttcacaaaacttctgagatccctgcgtcttttattgacttgcttgttttcctcaatttgaagtgcaaactagaaggcataaaaagag

SEQ ID NO: 24218 - DNA, 737 bp, synthetic construct
  source 1..737: mol_type = other DNA
ctccttaaataaattaagattaccactactgaggggagtagtccgactccgctccagcaatgctgcaccagtgaattggtacgctagtacctctgcacggagtagatggtatccctttccccgaaacttagaagaaagcaaacaaaccgaccaataggagcgcggcaaccagccgtgttgcggtcaagcacttctgtttccccggtccgcaaggatcgttatccgcccgacccactacggaaagcctagtaactggccaaacagcaaagaagttgcgctcggccacaaccccagtggtagctctggaggatggggctcgcatctcccccgtggtaacacggttgcttgcccgcgtgtgcctccgggttcagtcatcgactgttcacttcaatgctgtgtaaccagccaagagcctactgtgctgggacggttttcctccggggccgtgaatgctgctaatcccaacctccgagcgtgtgcgcacaaaccagtgttgctacgtcgtaacgcgtaagtcggaggcggaacagactactttcggtaccccgtgtttcctttgatttttatttaatattttatggtgacaattactgagatttgtgatttggctgctttaccattgaatattgctctgtactatttagtcgcatttcacaaaacttctgagatccctgcgtcttttattgacttgcttgttttcctcaatttgaagtgcaaactagaaggcataaaaagag

SEQ ID NO: 24219 - DNA, 687 bp, synthetic construct
  source 1..687: mol_type = other DNA
gctccagcaatgctgcaccagtgaattggtacgctagtacctctgcacggagtagatggtatccctttccccgaaacttagaagaaagcaaacaaaccgaccaataggagcgcggcaaccagccgtgttgcggtcaagcacttctgtttccccggtccgcaaggatcgttatccgcccgacccactacggaaagcctagtaactggccaaacagcaaagaagttgcgctcggccacaaccccagtggtagctctggaggatggggctcgcatctcccccgtggtaacacggttgcttgcccgcgtgtgcctccgggttcagtcatcgactgttcacttcaatgctgtgtaaccagccaagagcctactgtgctgggacggttttcctccggggccgtgaatgctgctaatcccaacctccgagcgtgtgcgcacaaaccagtgttgctacgtcgtaacgcgtaagtcggaggcggaacagactactttcggtaccccgtgtttcctttgatttttatttaatattttatggtgacaattactgagatttgtgatttggctgctttaccattgaatattgctctgtactatttagtcgcatttcacaaaacttctgagatccctgcgtcttttattgacttgcttgttttcctcaatttgaagtgcaaactagaaggcataaaaagag

SEQ ID NO: 24220 - DNA, 637 bp, synthetic construct
  source 1..637: mol_type = other DNA
agtagatggtatccctttccccgaaacttagaagaaagcaaacaaaccgaccaataggagcgcggcaaccagccgtgttgcggtcaagcacttctgtttccccggtccgcaaggatcgttatccgcccgacccactacggaaagcctagtaactggccaaacagcaaagaagttgcgctcggccacaaccccagtggtagctctggaggatggggctcgcatctcccccgtggtaacacggttgcttgcccgcgtgtgcctccgggttcagtcatcgactgttcacttcaatgctgtgtaaccagccaagagcctactgtgctgggacggttttcctccggggccgtgaatgctgctaatcccaacctccgagcgtgtgcgcacaaaccagtgttgctacgtcgtaacgcgtaagtcggaggcggaacagactactttcggtaccccgtgtttcctttgatttttatttaatattttatggtgacaattactgagatttgtgatttggctgctttaccattgaatattgctctgtactatttagtcgcatttcacaaaacttctgagatccctgcgtcttttattgacttgcttgttttcctcaatttgaagtgcaaactagaaggcataaaaagag

SEQ ID NO: 24221 - DNA, 587 bp, synthetic construct
  source 1..587: mol_type = other DNA
ccaataggagcgcggcaaccagccgtgttgcggtcaagcacttctgtttccccggtccgcaaggatcgttatccgcccgacccactacggaaagcctagtaactggccaaacagcaaagaagttgcgctcggccacaaccccagtggtagctctggaggatggggctcgcatctcccccgtggtaacacggttgcttgcccgcgtgtgcctccgggttcagtcatcgactgttcacttcaatgctgtgtaaccagccaagagcctactgtgctgggacggttttcctccggggccgtgaatgctgctaatcccaacctccgagcgtgtgcgcacaaaccagtgttgctacgtcgtaacgcgtaagtcggaggcggaacagactactttcggtaccccgtgtttcctttgatttttatttaatattttatggtgacaattactgagatttgtgatttggctgctttaccattgaatattgctctgtactatttagtcgcatttcacaaaacttctgagatccctgcgtcttttattgacttgcttgttttcctcaatttgaagtgcaaactagaaggcataaaaagag

SEQ ID NO: 24222 - DNA, 537 bp, synthetic construct
  source 1..537: mol_type = other DNA
cccggtccgcaaggatcgttatccgcccgacccactacggaaagcctagtaactggccaaacagcaaagaagttgcgctcggccacaaccccagtggtagctctggaggatggggctcgcatctcccccgtggtaacacggttgcttgcccgcgtgtgcctccgggttcagtcatcgactgttcacttcaatgctgtgtaaccagccaagagcctactgtgctgggacggttttcctccggggccgtgaatgctgctaatcccaacctccgagcgtgtgcgcacaaaccagtgttgctacgtcgtaacgcgtaagtcggaggcggaacagactactttcggtaccccgtgtttcctttgatttttatttaatattttatggtgacaattactgagatttgtgatttggctgctttaccattgaatattgctctgtactatttagtcgcatttcacaaaacttctgagatccctgcgtcttttattgacttgcttgttttcctcaatttgaagtgcaaactagaaggcataaaaagag

SEQ ID NO: 24223 - DNA, 797 bp, synthetic construct
  source 1..797: mol_type = other DNA
tactctgcttcgttagaagccttgtacgcctgttttcccctccttaaataaattaagattaccacttccgaggggagtagtccgactccgctccgatacgtcgctccagtgcgctagtacgcttagtactttctcacggggatagtggtacccctccctagtaatttagaagacttgaaaaaccgaccaataggcacctcgcatccagcggggtaaaggtcaagcacttctgtttccccgggtcgagtagcgatagactgtgcccacggtcgaaggtgaaacaacccgttatccgactttgtacttcgggaagcctagtaccaccaaagattatgcttggggtttcgctcagcacgaccctggtgtagatcaggctgatggatcaccgcgttcctcacaggcgactgtggcggtggtcgcgtggcagcctgccgatggggcaacccatcggacgccaagcatatgacagggtgtgaagagcctactgagctacaaagtattcctccggcccctgaatgcggctaatcccaaccacggagcatttgctaccaaaccaggtagtggaatgtcgtaacgggtaactctgtggcggaaccgactactttgggtgtccgtgtttccttttaatttatcattctgtgtatggtgacaactatagtgctatctcgatttgcattactattgttgagattgacactttattacattgttgcattttaccctttgagtgagttttcacctgaacagattaatttacttatcctgtttatatatcacaagcagaaatacttgcaaag

SEQ ID NO: 24224 - DNA, 747 bp, synthetic construct
  source 1..747: mol_type = other DNA
aattaagattaccacttccgaggggagtagtccgactccgctccgatacgtcgctccagtgcgctagtacgcttagtactttctcacggggatagtggtacccctccctagtaatttagaagacttgaaaaaccgaccaataggcacctcgcatccagcggggtaaaggtcaagcacttctgtttccccgggtcgagtagcgatagactgtgcccacggtcgaaggtgaaacaacccgttatccgactttgtacttcgggaagcctagtaccaccaaagattatgcttggggtttcgctcagcacgaccctggtgtagatcaggctgatggatcaccgcgttcctcacaggcgactgtggcggtggtcgcgtggcagcctgccgatggggcaacccatcggacgccaagcatatgacagggtgtgaagagcctactgagctacaaagtattcctccggcccctgaatgcggctaatcccaaccacggagcatttgctaccaaaccaggtagtggaatgtcgtaacgggtaactctgtggcggaaccgactactttgggtgtccgtgtttccttttaatttatcattctgtgtatggtgacaactatagtgctatctcgatttgcattactattgttgagattgacactttattacattgttgcattttaccctttgagtgagttttcacctgaacagattaatttacttatcctgtttatatatcacaagcagaaatacttgcaaag

SEQ ID NO: 24225 - DNA, 697 bp, synthetic construct
  source 1..697: mol_type = other DNA
tcgctccagtgcgctagtacgcttagtactttctcacggggatagtggtacccctccctagtaatttagaagacttgaaaaaccgaccaataggcacctcgcatccagcggggtaaaggtcaagcacttctgtttccccgggtcgagtagcgatagactgtgcccacggtcgaaggtgaaacaacccgttatccgactttgtacttcgggaagcctagtaccaccaaagattatgcttggggtttcgctcagcacgaccctggtgtagatcaggctgatggatcaccgcgttcctcacaggcgactgtggcggtggtcgcgtggcagcctgccgatggggcaacccatcggacgccaagcatatgacagggtgtgaagagcctactgagctacaaagtattcctccggcccctgaatgcggctaatcccaaccacggagcatttgctaccaaaccaggtagtggaatgtcgtaacgggtaactctgtggcggaaccgactactttgggtgtccgtgtttccttttaatttatcattctgtgtatggtgacaactatagtgctatctcgatttgcattactattgttgagattgacactttattacattgttgcattttaccctttgagtgagttttcacctgaacagattaatttacttatcctgtttatatatcacaagcagaaatacttgcaaag

SEQ ID NO: 24226 - DNA, 647 bp, synthetic construct
  source 1..647: mol_type = other DNA
cccctccctagtaatttagaagacttgaaaaaccgaccaataggcacctcgcatccagcggggtaaaggtcaagcacttctgtttccccgggtcgagtagcgatagactgtgcccacggtcgaaggtgaaacaacccgttatccgactttgtacttcgggaagcctagtaccaccaaagattatgcttggggtttcgctcagcacgaccctggtgtagatcaggctgatggatcaccgcgttcctcacaggcgactgtggcggtggtcgcgtggcagcctgccgatggggcaacccatcggacgccaagcatatgacagggtgtgaagagcctactgagctacaaagtattcctccggcccctgaatgcggctaatcccaaccacggagcatttgctaccaaaccaggtagtggaatgtcgtaacgggtaactctgtggcggaaccgactactttgggtgtccgtgtttccttttaatttatcattctgtgtatggtgacaactatagtgctatctcgatttgcattactattgttgagattgacactttattacattgttgcattttaccctttgagtgagttttcacctgaacagattaatttacttatcctgtttatatatcacaagcagaaatacttgcaaag

SEQ ID NO: 24227 - DNA, 597 bp, synthetic construct
  source 1..597: mol_type = other DNA
gcatccagcggggtaaaggtcaagcacttctgtttccccgggtcgagtagcgatagactgtgcccacggtcgaaggtgaaacaacccgttatccgactttgtacttcgggaagcctagtaccaccaaagattatgcttggggtttcgctcagcacgaccctggtgtagatcaggctgatggatcaccgcgttcctcacaggcgactgtggcggtggtcgcgtggcagcctgccgatggggcaacccatcggacgccaagcatatgacagggtgtgaagagcctactgagctacaaagtattcctccggcccctgaatgcggctaatcccaaccacggagcatttgctaccaaaccaggtagtggaatgtcgtaacgggtaactctgtggcggaaccgactactttgggtgtccgtgtttccttttaatttatcattctgtgtatggtgacaactatagtgctatctcgatttgcattactattgttgagattgacactttattacattgttgcattttaccctttgagtgagttttcacctgaacagattaatttacttatcctgtttatatatcacaagcagaaatacttgcaaag

SEQ ID NO: 24228 - DNA, 547 bp, synthetic construct
  source 1..547: mol_type = other DNA
cgatagactgtgcccacggtcgaaggtgaaacaacccgttatccgactttgtacttcgggaagcctagtaccaccaaagattatgcttggggtttcgctcagcacgaccctggtgtagatcaggctgatggatcaccgcgttcctcacaggcgactgtggcggtggtcgcgtggcagcctgccgatggggcaacccatcggacgccaagcatatgacagggtgtgaagagcctactgagctacaaagtattcctccggcccctgaatgcggctaatcccaaccacggagcatttgctaccaaaccaggtagtggaatgtcgtaacgggtaactctgtggcggaaccgactactttgggtgtccgtgtttccttttaatttatcattctgtgtatggtgacaactatagtgctatctcgatttgcattactattgttgagattgacactttattacattgttgcattttaccctttgagtgagttttcacctgaacagattaatttacttatcctgtttatatatcacaagcagaaatacttgcaaag

SEQ ID NO: 24229 - DNA, 817 bp, synthetic construct
  source 1..817: mol_type = other DNA
tttatgggtcgggcctagcccctttctgtaacggtctgtgtgagacctaaaaccacacataatatcgtgcctgatggttaacgcttgttagccgtctgtaaactaagaacctaccaacacactatgcacctcttggcgaagccgcttggaataagttgagaggaattatgcatgctagttgtgtttgtttacaactaattgttctaatccaagtgaagctcttcgcttggggcggcacgacacttgccgtaattcttctaccgtccctccacaccttgtggatgaagggccggatgtgtggcctctggctaacccctctctctggggtgatgctactggatgttttactcctagaccaaatcacatgaactcctcttgatccacttcggtggggctatgagcctgcggattaatagctggcgacagctaccccaggggccaaaagccacggtgttagcagcaccctcatagtctgatgcccaagggctgatgttgggagctagtagtgtgtgtctggcctatgtttaggacttctggccaagcgcagaggagtggggctgaaggatgcccagaaggtacccgtaggtaaccttaagagactatggatctgatctggggccccctcacgtggctttaccacgtgttgggggttaaaaaacgtctaggccccaccagcccacgggagtgggctttcccttaaaaagcccaacaatatttatggtgacaattcactgtttcttctttgcaatttttgtattcttggactccttattttttgtttgcttgattttagtggacattcagattcaaatacaaa

SEQ ID NO: 24230 - DNA, 767 bp, synthetic construct
  source 1..767: mol_type = other DNA
aaccacacataatatcgtgcctgatggttaacgcttgttagccgtctgtaaactaagaacctaccaacacactatgcacctcttggcgaagccgcttggaataagttgagaggaattatgcatgctagttgtgtttgtttacaactaattgttctaatccaagtgaagctcttcgcttggggcggcacgacacttgccgtaattcttctaccgtccctccacaccttgtggatgaagggccggatgtgtggcctctggctaacccctctctctggggtgatgctactggatgttttactcctagaccaaatcacatgaactcctcttgatccacttcggtggggctatgagcctgcggattaatagctggcgacagctaccccaggggccaaaagccacggtgttagcagcaccctcatagtctgatgcccaagggctgatgttgggagctagtagtgtgtgtctggcctatgtttaggacttctggccaagcgcagaggagtggggctgaaggatgcccagaaggtacccgtaggtaaccttaagagactatggatctgatctggggccccctcacgtggctttaccacgtgttgggggttaaaaaacgtctaggccccaccagcccacgggagtgggctttcccttaaaaagcccaacaatatttatggtgacaattcactgtttcttctttgcaatttttgtattcttggactccttattttttgtttgcttgattttagtggacattcagattcaaatacaaa

SEQ ID NO: 24231 - DNA, 717 bp, synthetic construct
  source 1..717: mol_type = other DNA
aactaagaacctaccaacacactatgcacctcttggcgaagccgcttggaataagttgagaggaattatgcatgctagttgtgtttgtttacaactaattgttctaatccaagtgaagctcttcgcttggggcggcacgacacttgccgtaattcttctaccgtccctccacaccttgtggatgaagggccggatgtgtggcctctggctaacccctctctctggggtgatgctactggatgttttactcctagaccaaatcacatgaactcctcttgatccacttcggtggggctatgagcctgcggattaatagctggcgacagctaccccaggggccaaaagccacggtgttagcagcaccctcatagtctgatgcccaagggctgatgttgggagctagtagtgtgtgtctggcctatgtttaggacttctggccaagcgcagaggagtggggctgaaggatgcccagaaggtacccgtaggtaaccttaagagactatggatctgatctggggccccctcacgtggctttaccacgtgttgggggttaaaaaacgtctaggccccaccagcccacgggagtgggctttcccttaaaaagcccaacaatatttatggtgacaattcactgtttcttctttgcaatttttgtattcttggactccttattttttgtttgcttgattttagtggacattcagattcaaatacaaa

SEQ ID NO: 24232 - DNA, 667 bp, synthetic construct
  source 1..667: mol_type = other DNA
ataagttgagaggaattatgcatgctagttgtgtttgtttacaactaattgttctaatccaagtgaagctcttcgcttggggcggcacgacacttgccgtaattcttctaccgtccctccacaccttgtggatgaagggccggatgtgtggcctctggctaacccctctctctggggtgatgctactggatgttttactcctagaccaaatcacatgaactcctcttgatccacttcggtggggctatgagcctgcggattaatagctggcgacagctaccccaggggccaaaagccacggtgttagcagcaccctcatagtctgatgcccaagggctgatgttgggagctagtagtgtgtgtctggcctatgtttaggacttctggccaagcgcagaggagtggggctgaaggatgcccagaaggtacccgtaggtaaccttaagagactatggatctgatctggggccccctcacgtggctttaccacgtgttgggggttaaaaaacgtctaggccccaccagcccacgggagtgggctttcccttaaaaagcccaacaatatttatggtgacaattcactgtttcttctttgcaatttttgtattcttggactccttattttttgtttgcttgattttagtggacattcagattcaaatacaaa

SEQ ID NO: 24233 - DNA, 617 bp, synthetic construct
  source 1..617: mol_type = other DNA
gttctaatccaagtgaagctcttcgcttggggcggcacgacacttgccgtaattcttctaccgtccctccacaccttgtggatgaagggccggatgtgtggcctctggctaacccctctctctggggtgatgctactggatgttttactcctagaccaaatcacatgaactcctcttgatccacttcggtggggctatgagcctgcggattaatagctggcgacagctaccccaggggccaaaagccacggtgttagcagcaccctcatagtctgatgcccaagggctgatgttgggagctagtagtgtgtgtctggcctatgtttaggacttctggccaagcgcagaggagtggggctgaaggatgcccagaaggtacccgtaggtaaccttaagagactatggatctgatctggggccccctcacgtggctttaccacgtgttgggggttaaaaaacgtctaggccccaccagcccacgggagtgggctttcccttaaaaagcccaacaatatttatggtgacaattcactgtttcttctttgcaatttttgtattcttggactccttattttttgtttgcttgattttagtggacattcagattcaaatacaaa

SEQ ID NO: 24234 - DNA, 567 bp, synthetic construct
  source 1..567: mol_type = other DNA
aattcttctaccgtccctccacaccttgtggatgaagggccggatgtgtggcctctggctaacccctctctctggggtgatgctactggatgttttactcctagaccaaatcacatgaactcctcttgatccacttcggtggggctatgagcctgcggattaatagctggcgacagctaccccaggggccaaaagccacggtgttagcagcaccctcatagtctgatgcccaagggctgatgttgggagctagtagtgtgtgtctggcctatgtttaggacttctggccaagcgcagaggagtggggctgaaggatgcccagaaggtacccgtaggtaaccttaagagactatggatctgatctggggccccctcacgtggctttaccacgtgttgggggttaaaaaacgtctaggccccaccagcccacgggagtgggctttcccttaaaaagcccaacaatatttatggtgacaattcactgtttcttctttgcaatttttgtattcttggactccttattttttgtttgcttgattttagtggacattcagattcaaatacaaa

SEQ ID NO: 24235 - DNA, 517 bp, synthetic construct
  source 1..517: mol_type = other DNA
gcctctggctaacccctctctctggggtgatgctactggatgttttactcctagaccaaatcacatgaactcctcttgatccacttcggtggggctatgagcctgcggattaatagctggcgacagctaccccaggggccaaaagccacggtgttagcagcaccctcatagtctgatgcccaagggctgatgttgggagctagtagtgtgtgtctggcctatgtttaggacttctggccaagcgcagaggagtggggctgaaggatgcccagaaggtacccgtaggtaaccttaagagactatggatctgatctggggccccctcacgtggctttaccacgtgttgggggttaaaaaacgtctaggccccaccagcccacgggagtgggctttcccttaaaaagcccaacaatatttatggtgacaattcactgtttcttctttgcaatttttgtattcttggactccttattttttgtttgcttgattttagtggacattcagattcaaatacaaa

SEQ ID NO: 24236 - DNA, 950 bp, synthetic construct
  source 1..950: mol_type = other DNA
ctctcctactcccgactcccgaccctaacccaggttcctcggtataggaacaccactttactcatcccctggatgctgactaatcagaggaacgtcagcattttccggcccaggctaagagaagtagataagttacaatccaaattgatttatcatccccttgacgaattcgcgttggaaaagcacctctcacttgccgctcttcacacccatcattttaattcggcctctgtgttgagccccttgttgaagtgtttctctccatcgcgacgtggttggagatctaagtcaaccgactccgacgaaactaccatcatgtctccccgattatgtgatgctttctgccctgctgggtggagcatcctcgggttgagaaatccttcttcctttcaccttggaccccggtcccccggtctaagccgcttggaataagacagggttattttcacctctttttcttctactccacagtgctctatactgtggaagggtatgtgttgccccttccttcttggagaacgtgcgcggcggtctttccgtctctcgacaagcgcgcgtgcaacatgcagagtaacgcgaagaaagcagttcttggactagctttagtatctgcaagaagacagctgtagcgaccacacaaaggcagcggaacccccctcctggtaacaggagcctctgcggccaaaagccacgtggataagatccacctttgtgtgcggtgcaaccccagcaccctggtttcttgaagatactctagtgaacccttgaatggcaatctcaagcgcctctgtaggaaagccaagaatgtccaggaggtacccctacctcgcggaagggatctgacctggagacacgtcgcaagtgctttacacctgtgctcgtgtttaaaaattgtcacagctttcccaaaccaagtggtcttggttttcctttttattactattgacact

SEQ ID NO: 24237 - DNA, 900 bp, synthetic construct
  source 1..900: mol_type = other DNA
caccactttactcatcccctggatgctgactaatcagaggaacgtcagcattttccggcccaggctaagagaagtagataagttacaatccaaattgatttatcatccccttgacgaattcgcgttggaaaagcacctctcacttgccgctcttcacacccatcattttaattcggcctctgtgttgagccccttgttgaagtgtttctctccatcgcgacgtggttggagatctaagtcaaccgactccgacgaaactaccatcatgtctccccgattatgtgatgctttctgccctgctgggtggagcatcctcgggttgagaaatccttcttcctttcaccttggaccccggtcccccggtctaagccgcttggaataagacagggttattttcacctctttttcttctactccacagtgctctatactgtggaagggtatgtgttgccccttccttcttggagaacgtgcgcggcggtctttccgtctctcgacaagcgcgcgtgcaacatgcagagtaacgcgaagaaagcagttcttggactagctttagtatctgcaagaagacagctgtagcgaccacacaaaggcagcggaacccccctcctggtaacaggagcctctgcggccaaaagccacgtggataagatccacctttgtgtgcggtgcaaccccagcaccctggtttcttgaagatactctagtgaacccttgaatggcaatctcaagcgcctctgtaggaaagccaagaatgtccaggaggtacccctacctcgcggaagggatctgacctggagacacgtcgcaagtgctttacacctgtgctcgtgtttaaaaattgtcacagctttcccaaaccaagtggtcttggttttcctttttattactattgacact

SEQ ID NO: 24238 - DNA, 850 bp, synthetic construct
  source 1..850: mol_type = other DNA
ttttccggcccaggctaagagaagtagataagttacaatccaaattgatttatcatccccttgacgaattcgcgttggaaaagcacctctcacttgccgctcttcacacccatcattttaattcggcctctgtgttgagccccttgttgaagtgtttctctccatcgcgacgtggttggagatctaagtcaaccgactccgacgaaactaccatcatgtctccccgattatgtgatgctttctgccctgctgggtggagcatcctcgggttgagaaatccttcttcctttcaccttggaccccggtcccccggtctaagccgcttggaataagacagggttattttcacctctttttcttctactccacagtgctctatactgtggaagggtatgtgttgccccttccttcttggagaacgtgcgcggcggtctttccgtctctcgacaagcgcgcgtgcaacatgcagagtaacgcgaagaaagcagttcttggactagctttagtatctgcaagaagacagctgtagcgaccacacaaaggcagcggaacccccctcctggtaacaggagcctctgcggccaaaagccacgtggataagatccacctttgtgtgcggtgcaaccccagcaccctggtttcttgaagatactctagtgaacccttgaatggcaatctcaagcgcctctgtaggaaagccaagaatgtccaggaggtacccctacctcgcggaagggatctgacctggagacacgtcgcaagtgctttacacctgtgctcgtgtttaaaaattgtcacagctttcccaaaccaagtggtcttggttttcctttttattactattgacact

SEQ ID NO: 24239 - DNA, 800 bp, synthetic construct
  source 1..800: mol_type = other DNA
tatcatccccttgacgaattcgcgttggaaaagcacctctcacttgccgctcttcacacccatcattttaattcggcctctgtgttgagccccttgttgaagtgtttctctccatcgcgacgtggttggagatctaagtcaaccgactccgacgaaactaccatcatgtctccccgattatgtgatgctttctgccctgctgggtggagcatcctcgggttgagaaatccttcttcctttcaccttggaccccggtcccccggtctaagccgcttggaataagacagggttattttcacctctttttcttctactccacagtgctctatactgtggaagggtatgtgttgccccttccttcttggagaacgtgcgcggcggtctttccgtctctcgacaagcgcgcgtgcaacatgcagagtaacgcgaagaaagcagttcttggactagctttagtatctgcaagaagacagctgtagcgaccacacaaaggcagcggaacccccctcctggtaacaggagcctctgcggccaaaagccacgtggataagatccacctttgtgtgcggtgcaaccccagcaccctggtttcttgaagatactctagtgaacccttgaatggcaatctcaagcgcctctgtaggaaagccaagaatgtccaggaggtacccctacctcgcggaagggatctgacctggagacacgtcgcaagtgctttacacctgtgctcgtgtttaaaaattgtcacagctttcccaaaccaagtggtcttggttttcctttttattactattgacact

SEQ ID NO: 24240 - DNA, 750 bp, synthetic construct
  source 1..750: mol_type = other DNA
tcttcacacccatcattttaattcggcctctgtgttgagccccttgttgaagtgtttctctccatcgcgacgtggttggagatctaagtcaaccgactccgacgaaactaccatcatgtctccccgattatgtgatgctttctgccctgctgggtggagcatcctcgggttgagaaatccttcttcctttcaccttggaccccggtcccccggtctaagccgcttggaataagacagggttattttcacctctttttcttctactccacagtgctctatactgtggaagggtatgtgttgccccttccttcttggagaacgtgcgcggcggtctttccgtctctcgacaagcgcgcgtgcaacatgcagagtaacgcgaagaaagcagttcttggactagctttagtatctgcaagaagacagctgtagcgaccacacaaaggcagcggaacccccctcctggtaacaggagcctctgcggccaaaagccacgtggataagatccacctttgtgtgcggtgcaaccccagcaccctggtttcttgaagatactctagtgaacccttgaatggcaatctcaagcgcctctgtaggaaagccaagaatgtccaggaggtacccctacctcgcggaagggatctgacctggagacacgtcgcaagtgctttacacctgtgctcgtgtttaaaaattgtcacagctttcccaaaccaagtggtcttggttttcctttttattactattgacact

SEQ ID NO: 24241 - DNA, 700 bp, synthetic construct
  source 1..700: mol_type = other DNA
agtgtttctctccatcgcgacgtggttggagatctaagtcaaccgactccgacgaaactaccatcatgtctccccgattatgtgatgctttctgccctgctgggtggagcatcctcgggttgagaaatccttcttcctttcaccttggaccccggtcccccggtctaagccgcttggaataagacagggttattttcacctctttttcttctactccacagtgctctatactgtggaagggtatgtgttgccccttccttcttggagaacgtgcgcggcggtctttccgtctctcgacaagcgcgcgtgcaacatgcagagtaacgcgaagaaagcagttcttggactagctttagtatctgcaagaagacagctgtagcgaccacacaaaggcagcggaacccccctcctggtaacaggagcctctgcggccaaaagccacgtggataagatccacctttgtgtgcggtgcaaccccagcaccctggtttcttgaagatactctagtgaacccttgaatggcaatctcaagcgcctctgtaggaaagccaagaatgtccaggaggtacccctacctcgcggaagggatctgacctggagacacgtcgcaagtgctttacacctgtgctcgtgtttaaaaattgtcacagctttcccaaaccaagtggtcttggttttcctttttattactattgacact

SEQ ID NO: 24242 - DNA, 650 bp, synthetic construct
  source 1..650: mol_type = other DNA
gacgaaactaccatcatgtctccccgattatgtgatgctttctgccctgctgggtggagcatcctcgggttgagaaatccttcttcctttcaccttggaccccggtcccccggtctaagccgcttggaataagacagggttattttcacctctttttcttctactccacagtgctctatactgtggaagggtatgtgttgccccttccttcttggagaacgtgcgcggcggtctttccgtctctcgacaagcgcgcgtgcaacatgcagagtaacgcgaagaaagcagttcttggactagctttagtatctgcaagaagacagctgtagcgaccacacaaaggcagcggaacccccctcctggtaacaggagcctctgcggccaaaagccacgtggataagatccacctttgtgtgcggtgcaaccccagcaccctggtttcttgaagatactctagtgaacccttgaatggcaatctcaagcgcctctgtaggaaagccaagaatgtccaggaggtacccctacctcgcggaagggatctgacctggagacacgtcgcaagtgctttacacctgtgctcgtgtttaaaaattgtcacagctttcccaaaccaagtggtcttggttttcctttttattactattgacact

SEQ ID NO: 24243 - DNA, 600 bp, synthetic construct
  source 1..600: mol_type = other DNA
tgggtggagcatcctcgggttgagaaatccttcttcctttcaccttggaccccggtcccccggtctaagccgcttggaataagacagggttattttcacctctttttcttctactccacagtgctctatactgtggaagggtatgtgttgccccttccttcttggagaacgtgcgcggcggtctttccgtctctcgacaagcgcgcgtgcaacatgcagagtaacgcgaagaaagcagttcttggactagctttagtatctgcaagaagacagctgtagcgaccacacaaaggcagcggaacccccctcctggtaacaggagcctctgcggccaaaagccacgtggataagatccacctttgtgtgcggtgcaaccccagcaccctggtttcttgaagatactctagtgaacccttgaatggcaatctcaagcgcctctgtaggaaagccaagaatgtccaggaggtacccctacctcgcggaagggatctgacctggagacacgtcgcaagtgctttacacctgtgctcgtgtttaaaaattgtcacagctttcccaaaccaagtggtcttggttttcctttttattactattgacact

SEQ ID NO: 24244 - DNA, 550 bp, synthetic construct
  source 1..550: mol_type = other DNA
cccggtcccccggtctaagccgcttggaataagacagggttattttcacctctttttcttctactccacagtgctctatactgtggaagggtatgtgttgccccttccttcttggagaacgtgcgcggcggtctttccgtctctcgacaagcgcgcgtgcaacatgcagagtaacgcgaagaaagcagttcttggactagctttagtatctgcaagaagacagctgtagcgaccacacaaaggcagcggaacccccctcctggtaacaggagcctctgcggccaaaagccacgtggataagatccacctttgtgtgcggtgcaaccccagcaccctggtttcttgaagatactctagtgaacccttgaatggcaatctcaagcgcctctgtaggaaagccaagaatgtccaggaggtacccctacctcgcggaagggatctgacctggagacacgtcgcaagtgctttacacctgtgctcgtgtttaaaaattgtcacagctttcccaaaccaagtggtcttggttttcctttttattactattgacact

SEQ ID NO: 24245 - DNA, 500 bp, synthetic construct
  source 1..500: mol_type = other DNA
tctttttcttctactccacagtgctctatactgtggaagggtatgtgttgccccttccttcttggagaacgtgcgcggcggtctttccgtctctcgacaagcgcgcgtgcaacatgcagagtaacgcgaagaaagcagttcttggactagctttagtatctgcaagaagacagctgtagcgaccacacaaaggcagcggaacccccctcctggtaacaggagcctctgcggccaaaagccacgtggataagatccacctttgtgtgcggtgcaaccccagcaccctggtttcttgaagatactctagtgaacccttgaatggcaatctcaagcgcctctgtaggaaagccaagaatgtccaggaggtacccctacctcgcggaagggatctgacctggagacacgtcgcaagtgctttacacctgtgctcgtgtttaaaaattgtcacagctttcccaaaccaagtggtcttggttttcctttttattactattgacact

SEQ ID NO: 24246 - DNA, 950 bp, synthetic construct
  source 1..950: mol_type = other DNA
acatggctgaaaagggtattgggtccccccggattgtgtccgttcgtagtgtgtgtaacgtggtttaccatctccactaacattggactaagcatttcatctttcctccccgattgtgtactcacttggctaacgctgggtggtcgcggttgggtccttgatttactttttctcgtctaagcattccgactgtcctccccgattatgtgctcattcagttaactgctgggtggtcatgactaacatcgaggaaccttctgtccacgcttactttgagctccggtcgcttgacgcttgtagggcgatagggttatcttcctgacaacatctttattctacctccataggctctatctatggagacggagtgtggcacccgtcccttctttgggagcttcggtagtgacgccctttgtcactctcgccagccgaggcatgcctggtgccaggtagcaaagaaagcatatgtttaaggacttgactgatttagcgcaagagtttgtagcgatgtccatagtgtctgcggattccccacacggcgacgtgtgccgcggaggccaaaagccacggtgttcacagcacccctatggatgcccacagaccccagtgggcactcttgttgccggactttcaggaaattaggcataggctcttctcaaactcctggcattggactaggtaagaatgccccggaggtaccccagtactccttcgggagtctgggatctgaccgggggccccacaaacatgctttacgtgtttcgtgcggtcaaaaattgtctaactagtcccaaccttgaacaagggattgttctttcctttttattactgagactggcctatggtgacaacagagattgactgtgaatacagttattttctggtgtttatcatttggtttttctccgtgctcttttacctttgtggtatttgttctttagataggcaaa

SEQ ID NO: 24247 - DNA, 900 bp, synthetic construct
  source 1..900: mol_type = other DNA
gtgtgtaacgtggtttaccatctccactaacattggactaagcatttcatctttcctccccgattgtgtactcacttggctaacgctgggtggtcgcggttgggtccttgatttactttttctcgtctaagcattccgactgtcctccccgattatgtgctcattcagttaactgctgggtggtcatgactaacatcgaggaaccttctgtccacgcttactttgagctccggtcgcttgacgcttgtagggcgatagggttatcttcctgacaacatctttattctacctccataggctctatctatggagacggagtgtggcacccgtcccttctttgggagcttcggtagtgacgccctttgtcactctcgccagccgaggcatgcctggtgccaggtagcaaagaaagcatatgtttaaggacttgactgatttagcgcaagagtttgtagcgatgtccatagtgtctgcggattccccacacggcgacgtgtgccgcggaggccaaaagccacggtgttcacagcacccctatggatgcccacagaccccagtgggcactcttgttgccggactttcaggaaattaggcataggctcttctcaaactcctggcattggactaggtaagaatgccccggaggtaccccagtactccttcgggagtctgggatctgaccgggggccccacaaacatgctttacgtgtttcgtgcggtcaaaaattgtctaactagtcccaaccttgaacaagggattgttctttcctttttattactgagactggcctatggtgacaacagagattgactgtgaatacagttattttctggtgtttatcatttggtttttctccgtgctcttttacctttgtggtatttgttctttagataggcaaa

SEQ ID NO: 24248 - DNA, 850 bp, synthetic construct
  source 1..850: mol_type = other DNA
ctttcctccccgattgtgtactcacttggctaacgctgggtggtcgcggttgggtccttgatttactttttctcgtctaagcattccgactgtcctccccgattatgtgctcattcagttaactgctgggtggtcatgactaacatcgaggaaccttctgtccacgcttactttgagctccggtcgcttgacgcttgtagggcgatagggttatcttcctgacaacatctttattctacctccataggctctatctatggagacggagtgtggcacccgtcccttctttgggagcttcggtagtgacgccctttgtcactctcgccagccgaggcatgcctggtgccaggtagcaaagaaagcatatgtttaaggacttgactgatttagcgcaagagtttgtagcgatgtccatagtgtctgcggattccccacacggcgacgtgtgccgcggaggccaaaagccacggtgttcacagcacccctatggatgcccacagaccccagtgggcactcttgttgccggactttcaggaaattaggcataggctcttctcaaactcctggcattggactaggtaagaatgccccggaggtaccccagtactccttcgggagtctgggatctgaccgggggccccacaaacatgctttacgtgtttcgtgcggtcaaaaattgtctaactagtcccaaccttgaacaagggattgttctttcctttttattactgagactggcctatggtgacaacagagattgactgtgaatacagttattttctggtgtttatcatttggtttttctccgtgctcttttacctttgtggtatttgttctttagataggcaaa

SEQ ID NO: 24249 - DNA, 800 bp, synthetic construct
  source 1..800: mol_type = other DNA
tgggtccttgatttactttttctcgtctaagcattccgactgtcctccccgattatgtgctcattcagttaactgctgggtggtcatgactaacatcgaggaaccttctgtccacgcttactttgagctccggtcgcttgacgcttgtagggcgatagggttatcttcctgacaacatctttattctacctccataggctctatctatggagacggagtgtggcacccgtcccttctttgggagcttcggtagtgacgccctttgtcactctcgccagccgaggcatgcctggtgccaggtagcaaagaaagcatatgtttaaggacttgactgatttagcgcaagagtttgtagcgatgtccatagtgtctgcggattccccacacggcgacgtgtgccgcggaggccaaaagccacggtgttcacagcacccctatggatgcccacagaccccagtgggcactcttgttgccggactttcaggaaattaggcataggctcttctcaaactcctggcattggactaggtaagaatgccccggaggtaccccagtactccttcgggagtctgggatctgaccgggggccccacaaacatgctttacgtgtttcgtgcggtcaaaaattgtctaactagtcccaaccttgaacaagggattgttctttcctttttattactgagactggcctatggtgacaacagagattgactgtgaatacagttattttctggtgtttatcatttggtttttctccgtgctcttttacctttgtggtatttgttctttagataggcaaa

SEQ ID NO: 24250 - DNA, 750 bp, synthetic construct
  source 1..750: mol_type = other DNA
gattatgtgctcattcagttaactgctgggtggtcatgactaacatcgaggaaccttctgtccacgcttactttgagctccggtcgcttgacgcttgtagggcgatagggttatcttcctgacaacatctttattctacctccataggctctatctatggagacggagtgtggcacccgtcccttctttgggagcttcggtagtgacgccctttgtcactctcgccagccgaggcatgcctggtgccaggtagcaaagaaagcatatgtttaaggacttgactgatttagcgcaagagtttgtagcgatgtccatagtgtctgcggattccccacacggcgacgtgtgccgcggaggccaaaagccacggtgttcacagcacccctatggatgcccacagaccccagtgggcactcttgttgccggactttcaggaaattaggcataggctcttctcaaactcctggcattggactaggtaagaatgccccggaggtaccccagtactccttcgggagtctgggatctgaccgggggccccacaaacatgctttacgtgtttcgtgcggtcaaaaattgtctaactagtcccaaccttgaacaagggattgttctttcctttttattactgagactggcctatggtgacaacagagattgactgtgaatacagttattttctggtgtttatcatttggtttttctccgtgctcttttacctttgtggtatttgttctttagataggcaaa

SEQ ID NO: 24251 - DNA, 700 bp, synthetic construct
  source 1..700: mol_type = other DNA
gaaccttctgtccacgcttactttgagctccggtcgcttgacgcttgtagggcgatagggttatcttcctgacaacatctttattctacctccataggctctatctatggagacggagtgtggcacccgtcccttctttgggagcttcggtagtgacgccctttgtcactctcgccagccgaggcatgcctggtgccaggtagcaaagaaagcatatgtttaaggacttgactgatttagcgcaagagtttgtagcgatgtccatagtgtctgcggattccccacacggcgacgtgtgccgcggaggccaaaagccacggtgttcacagcacccctatggatgcccacagaccccagtgggcactcttgttgccggactttcaggaaattaggcataggctcttctcaaactcctggcattggactaggtaagaatgccccggaggtaccccagtactccttcgggagtctgggatctgaccgggggccccacaaacatgctttacgtgtttcgtgcggtcaaaaattgtctaactagtcccaaccttgaacaagggattgttctttcctttttattactgagactggcctatggtgacaacagagattgactgtgaatacagttattttctggtgtttatcatttggtttttctccgtgctcttttacctttgtggtatttgttctttagataggcaaa

SEQ ID NO: 24252 - DNA, 650 bp, synthetic construct
  source 1..650: mol_type = other DNA
ggcgatagggttatcttcctgacaacatctttattctacctccataggctctatctatggagacggagtgtggcacccgtcccttctttgggagcttcggtagtgacgccctttgtcactctcgccagccgaggcatgcctggtgccaggtagcaaagaaagcatatgtttaaggacttgactgatttagcgcaagagtttgtagcgatgtccatagtgtctgcggattccccacacggcgacgtgtgccgcggaggccaaaagccacggtgttcacagcacccctatggatgcccacagaccccagtgggcactcttgttgccggactttcaggaaattaggcataggctcttctcaaactcctggcattggactaggtaagaatgccccggaggtaccccagtactccttcgggagtctgggatctgaccgggggccccacaaacatgctttacgtgtttcgtgcggtcaaaaattgtctaactagtcccaaccttgaacaagggattgttctttcctttttattactgagactggcctatggtgacaacagagattgactgtgaatacagttattttctggtgtttatcatttggtttttctccgtgctcttttacctttgtggtatttgttctttagataggcaaa

SEQ ID NO: 24253 - DNA, 600 bp, synthetic construct
  source 1..600: mol_type = other DNA
ctatctatggagacggagtgtggcacccgtcccttctttgggagcttcggtagtgacgccctttgtcactctcgccagccgaggcatgcctggtgccaggtagcaaagaaagcatatgtttaaggacttgactgatttagcgcaagagtttgtagcgatgtccatagtgtctgcggattccccacacggcgacgtgtgccgcggaggccaaaagccacggtgttcacagcacccctatggatgcccacagaccccagtgggcactcttgttgccggactttcaggaaattaggcataggctcttctcaaactcctggcattggactaggtaagaatgccccggaggtaccccagtactccttcgggagtctgggatctgaccgggggccccacaaacatgctttacgtgtttcgtgcggtcaaaaattgtctaactagtcccaaccttgaacaagggattgttctttcctttttattactgagactggcctatggtgacaacagagattgactgtgaatacagttattttctggtgtttatcatttggtttttctccgtgctcttttacctttgtggtatttgttctttagataggcaaa

SEQ ID NO: 24254 - DNA, 550 bp, synthetic construct
  source 1..550: mol_type = other DNA
tagtgacgccctttgtcactctcgccagccgaggcatgcctggtgccaggtagcaaagaaagcatatgtttaaggacttgactgatttagcgcaagagtttgtagcgatgtccatagtgtctgcggattccccacacggcgacgtgtgccgcggaggccaaaagccacggtgttcacagcacccctatggatgcccacagaccccagtgggcactcttgttgccggactttcaggaaattaggcataggctcttctcaaactcctggcattggactaggtaagaatgccccggaggtaccccagtactccttcgggagtctgggatctgaccgggggccccacaaacatgctttacgtgtttcgtgcggtcaaaaattgtctaactagtcccaaccttgaacaagggattgttctttcctttttattactgagactggcctatggtgacaacagagattgactgtgaatacagttattttctggtgtttatcatttggtttttctccgtgctcttttacctttgtggtatttgttctttagataggcaaa

SEQ ID NO: 24255 - DNA, 500 bp, synthetic construct
  source 1..500: mol_type = other DNA
tagcaaagaaagcatatgtttaaggacttgactgatttagcgcaagagtttgtagcgatgtccatagtgtctgcggattccccacacggcgacgtgtgccgcggaggccaaaagccacggtgttcacagcacccctatggatgcccacagaccccagtgggcactcttgttgccggactttcaggaaattaggcataggctcttctcaaactcctggcattggactaggtaagaatgccccggaggtaccccagtactccttcgggagtctgggatctgaccgggggccccacaaacatgctttacgtgtttcgtgcggtcaaaaattgtctaactagtcccaaccttgaacaagggattgttctttcctttttattactgagactggcctatggtgacaacagagattgactgtgaatacagttattttctggtgtttatcatttggtttttctccgtgctcttttacctttgtggtatttgttctttagataggcaaa

SEQ ID NO: 24256 - DNA, 628 bp, synthetic construct
  source 1..628: mol_type = other DNA
caaaaggctacaccacttgggctacggcccgcgccaccttgtggcgcaaagacattagaagaatagcataccgcccactagggccctgcagccagcagggtaacgggcaagcacttctgtctccccggtagaacggtataggctgtacccacggccgaaaactgaactatcgttacccgactccgtacttcgcaaagcttagtaggaaactggaaagttcgagttattgacccggagtgttccccccactccagaaacgcgtgatgagggttgccaccccgaccatggcgacatggtgggcatccctgcgctggcacgcggcctctaagaggataactcgctcctactggtaaccgaagagccccgtgagctacggtttattcctccgcctccctgaatgcggctaatcctaacccatgagcagttgccatagatccatatggtggactgtcgtaacgcgtaagttgtgggcggaaccgactactttgggatggcgtgtttccttgttttctccatttgttgttgtatggtgacaagttatagatctcgatctatagcgtttcttgagagatttccaaacatttattcaagtcgtacaattcttgtgtttaagcagtacagtgtaagg

SEQ ID NO: 24257 - DNA, 578 bp, synthetic construct
  source 1..578: mol_type = other DNA
gacattagaagaatagcataccgcccactagggccctgcagccagcagggtaacgggcaagcacttctgtctccccggtagaacggtataggctgtacccacggccgaaaactgaactatcgttacccgactccgtacttcgcaaagcttagtaggaaactggaaagttcgagttattgacccggagtgttccccccactccagaaacgcgtgatgagggttgccaccccgaccatggcgacatggtgggcatccctgcgctggcacgcggcctctaagaggataactcgctcctactggtaaccgaagagccccgtgagctacggtttattcctccgcctccctgaatgcggctaatcctaacccatgagcagttgccatagatccatatggtggactgtcgtaacgcgtaagttgtgggcggaaccgactactttgggatggcgtgtttccttgttttctccatttgttgttgtatggtgacaagttatagatctcgatctatagcgtttcttgagagatttccaaacatttattcaagtcgtacaattcttgtgtttaagcagtacagtgtaagg

SEQ ID NO: 24258 - DNA, 528 bp, synthetic construct
  source 1..528: mol_type = other DNA
taacgggcaagcacttctgtctccccggtagaacggtataggctgtacccacggccgaaaactgaactatcgttacccgactccgtacttcgcaaagcttagtaggaaactggaaagttcgagttattgacccggagtgttccccccactccagaaacgcgtgatgagggttgccaccccgaccatggcgacatggtgggcatccctgcgctggcacgcggcctctaagaggataactcgctcctactggtaaccgaagagccccgtgagctacggtttattcctccgcctccctgaatgcggctaatcctaacccatgagcagttgccatagatccatatggtggactgtcgtaacgcgtaagttgtgggcggaaccgactactttgggatggcgtgtttccttgttttctccatttgttgttgtatggtgacaagttatagatctcgatctatagcgtttcttgagagatttccaaacatttattcaagtcgtacaattcttgtgtttaagcagtacagtgtaagg

SEQ ID NO: 24259 - DNA, 678 bp, synthetic construct
  source 1..678: mol_type = other DNA
caaccctttcataaccccccccttttaacccaacccttcgtaaccgtacgcttcactcgcctttgggtatagcggcccaatgtgctgaagaaaaggatacgctataaggggccaacgggtggtggcccttaagaccacccaacctagaagcttgtacactcgggcaatagtgaggcccacatccagtgggtcaagcccaaagcattcttgttccccggtatgatctcataagctgtacccacggctgaaagagtgattatcgttatcccactcagtacttcggagagcctagtacaccacttggaaatggaagtctgtgatccggggttgaccctgaaccccagaaactcatgatgaggctaaccttcccgaacacggcgacgtgtggttagcctgcgctggcatgaggcctctttgtaggcagactgaaatggaagggtgacgaagagccgactgagctactgttttattcctccggccccctgaatgcggctaatcctaactcctggtccagtacttgtaacccaacaggtggctggtcgtaatgcgtaagccgggagcggaaccgactactttggggcgtccgtgtttctcaatattattcatttctagcttatggtgacaatttatgattgcagagattgtgctgtatttgtgtctgagagaagaagtaacaat

SEQ ID NO: 24260 - DNA, 628 bp, synthetic construct
  source 1..628: mol_type = other DNA
cttcactcgcctttgggtatagcggcccaatgtgctgaagaaaaggatacgctataaggggccaacgggtggtggcccttaagaccacccaacctagaagcttgtacactcgggcaatagtgaggcccacatccagtgggtcaagcccaaagcattcttgttccccggtatgatctcataagctgtacccacggctgaaagagtgattatcgttatcccactcagtacttcggagagcctagtacaccacttggaaatggaagtctgtgatccggggttgaccctgaaccccagaaactcatgatgaggctaaccttcccgaacacggcgacgtgtggttagcctgcgctggcatgaggcctctttgtaggcagactgaaatggaagggtgacgaagagccgactgagctactgttttattcctccggccccctgaatgcggctaatcctaactcctggtccagtacttgtaacccaacaggtggctggtcgtaatgcgtaagccgggagcggaaccgactactttggggcgtccgtgtttctcaatattattcatttctagcttatggtgacaatttatgattgcagagattgtgctgtatttgtgtctgagagaagaagtaacaat

SEQ ID NO: 24261 - DNA, 578 bp, synthetic construct
  source 1..578: mol_type = other DNA
gctataaggggccaacgggtggtggcccttaagaccacccaacctagaagcttgtacactcgggcaatagtgaggcccacatccagtgggtcaagcccaaagcattcttgttccccggtatgatctcataagctgtacccacggctgaaagagtgattatcgttatcccactcagtacttcggagagcctagtacaccacttggaaatggaagtctgtgatccggggttgaccctgaaccccagaaactcatgatgaggctaaccttcccgaacacggcgacgtgtggttagcctgcgctggcatgaggcctctttgtaggcagactgaaatggaagggtgacgaagagccgactgagctactgttttattcctccggccccctgaatgcggctaatcctaactcctggtccagtacttgtaacccaacaggtggctggtcgtaatgcgtaagccgggagcggaaccgactactttggggcgtccgtgtttctcaatattattcatttctagcttatggtgacaatttatgattgcagagattgtgctgtatttgtgtctgagagaagaagtaacaat

SEQ ID NO: 24262 - DNA, 528 bp, synthetic construct
  source 1..528: mol_type = other DNA
cttgtacactcgggcaatagtgaggcccacatccagtgggtcaagcccaaagcattcttgttccccggtatgatctcataagctgtacccacggctgaaagagtgattatcgttatcccactcagtacttcggagagcctagtacaccacttggaaatggaagtctgtgatccggggttgaccctgaaccccagaaactcatgatgaggctaaccttcccgaacacggcgacgtgtggttagcctgcgctggcatgaggcctctttgtaggcagactgaaatggaagggtgacgaagagccgactgagctactgttttattcctccggccccctgaatgcggctaatcctaactcctggtccagtacttgtaacccaacaggtggctggtcgtaatgcgtaagccgggagcggaaccgactactttggggcgtccgtgtttctcaatattattcatttctagcttatggtgacaatttatgattgcagagattgtgctgtatttgtgtctgagagaagaagtaacaat

SEQ ID NO: 24263 - DNA, 681 bp, synthetic construct
  source 1..681: mol_type = other DNA
tacgggagtgagcccacgaccgttggggtttttaccccaccgttcgtggacctcatttctgcttattacttcccccactttcatcggggacgttccttttgccgcacacccagtgcggcaggaggtaacgagtttattttgtatagttgttattagtcacaccggagggcgtgctttacgctcttaagggcttaacccactccgttgtgcctgtcacttgtcgcttgacggcggctggtctagtacgggtctagttagtaccactcagtggtcagggtgtgccgcccgttgaaggctggtattcccgcgtgagggggctaccgtggtaacacggtccttgcgtgtgtgtgagccagtatgctctctggagctgccattgtttgggaaagctcttccccgaacaactaagtgcctgatggcctcatttggctgattggtgctctcaagacatgtgccggaggcaagcttgttggaaccaccagcaagccctgaccggtagctaattagtcccttgacggcatcgaatttttcctttttccttttctttttgtgaactgaatatagtgatttgtgtttagtgcttttgtgcctttgtcacttttactttgtcaaatattagtgtttgtgcatttgttttaaactgcaacttgttgttaatttttggacaatttgaacttagac

SEQ ID NO: 24264 - DNA, 631 bp, synthetic construct
  source 1..631: mol_type = other DNA
cctcatttctgcttattacttcccccactttcatcggggacgttccttttgccgcacacccagtgcggcaggaggtaacgagtttattttgtatagttgttattagtcacaccggagggcgtgctttacgctcttaagggcttaacccactccgttgtgcctgtcacttgtcgcttgacggcggctggtctagtacgggtctagttagtaccactcagtggtcagggtgtgccgcccgttgaaggctggtattcccgcgtgagggggctaccgtggtaacacggtccttgcgtgtgtgtgagccagtatgctctctggagctgccattgtttgggaaagctcttccccgaacaactaagtgcctgatggcctcatttggctgattggtgctctcaagacatgtgccggaggcaagcttgttggaaccaccagcaagccctgaccggtagctaattagtcccttgacggcatcgaatttttcctttttccttttctttttgtgaactgaatatagtgatttgtgtttagtgcttttgtgcctttgtcacttttactttgtcaaatattagtgtttgtgcatttgttttaaactgcaacttgttgttaatttttggacaatttgaacttagac

SEQ ID NO: 24265 - DNA, 581 bp, synthetic construct
  source 1..581: mol_type = other DNA
gccgcacacccagtgcggcaggaggtaacgagtttattttgtatagttgttattagtcacaccggagggcgtgctttacgctcttaagggcttaacccactccgttgtgcctgtcacttgtcgcttgacggcggctggtctagtacgggtctagttagtaccactcagtggtcagggtgtgccgcccgttgaaggctggtattcccgcgtgagggggctaccgtggtaacacggtccttgcgtgtgtgtgagccagtatgctctctggagctgccattgtttgggaaagctcttccccgaacaactaagtgcctgatggcctcatttggctgattggtgctctcaagacatgtgccggaggcaagcttgttggaaccaccagcaagccctgaccggtagctaattagtcccttgacggcatcgaatttttcctttttccttttctttttgtgaactgaatatagtgatttgtgtttagtgcttttgtgcctttgtcacttttactttgtcaaatattagtgtttgtgcatttgttttaaactgcaacttgttgttaatttttggacaatttgaacttagac

SEQ ID NO: 24266 - DNA, 531 bp, synthetic construct
  source 1..531: mol_type = other DNA
tattagtcacaccggagggcgtgctttacgctcttaagggcttaacccactccgttgtgcctgtcacttgtcgcttgacggcggctggtctagtacgggtctagttagtaccactcagtggtcagggtgtgccgcccgttgaaggctggtattcccgcgtgagggggctaccgtggtaacacggtccttgcgtgtgtgtgagccagtatgctctctggagctgccattgtttgggaaagctcttccccgaacaactaagtgcctgatggcctcatttggctgattggtgctctcaagacatgtgccggaggcaagcttgttggaaccaccagcaagccctgaccggtagctaattagtcccttgacggcatcgaatttttcctttttccttttctttttgtgaactgaatatagtgatttgtgtttagtgcttttgtgcctttgtcacttttactttgtcaaatattagtgtttgtgcatttgttttaaactgcaacttgttgttaatttttggacaatttgaacttagac

SEQ ID NO: 24267 - DNA, 739 bp, synthetic construct
  source 1..739: mol_type = other DNA
tacgcctgttttccctcccctaaataaattaagatcaccactactgtggggagtagtccgactccgcaccgatacgtcgcaccagtgaactggttcgcttaggacctttacacggagtagatggtgttcccttcccccgtaacttagaagcatgaaccaaccgaccaatagtggcgttgcatccagcagcgcagcggtcaagcacttctgtttccccggcgcgaagcgtcgttacccgcccagcctactgcgggaagcctagtagcaccccaattgatcgcgcggttgcgttcagccacaaccccagtggtagctctgaggaatggagctcgccgtccccccacagcaatgtggtggcttgctcgcgcgtgtcctcgggttcactcaaagagtgttcaccgcaacatcaagtaaggtgtgaagagcctactgcgctaggctggttttcctccggagccgtgaatgctgctaatcccaacctccgagcgtgtgcgcacaatccagtgttgctacgtcgtaacgcgtaagtcggaggcggaacagactactttcggtactccgtgtttccttattttgtttcaatattttatggtgacattgactgatatctgtgaatttgctcgctgcccctgaatattgccttatattacttaatagcatttcacgaaaacgacccagctttcaattgagcttattaactttgctgtatctttaaaccagatccacaagtcggtgtaca

SEQ ID NO: 24268 - DNA, 689 bp, synthetic construct
  source 1..689: mol_type = other DNA
gagtagtccgactccgcaccgatacgtcgcaccagtgaactggttcgcttaggacctttacacggagtagatggtgttcccttcccccgtaacttagaagcatgaaccaaccgaccaatagtggcgttgcatccagcagcgcagcggtcaagcacttctgtttccccggcgcgaagcgtcgttacccgcccagcctactgcgggaagcctagtagcaccccaattgatcgcgcggttgcgttcagccacaaccccagtggtagctctgaggaatggagctcgccgtccccccacagcaatgtggtggcttgctcgcgcgtgtcctcgggttcactcaaagagtgttcaccgcaacatcaagtaaggtgtgaagagcctactgcgctaggctggttttcctccggagccgtgaatgctgctaatcccaacctccgagcgtgtgcgcacaatccagtgttgctacgtcgtaacgcgtaagtcggaggcggaacagactactttcggtactccgtgtttccttattttgtttcaatattttatggtgacattgactgatatctgtgaatttgctcgctgcccctgaatattgccttatattacttaatagcatttcacgaaaacgacccagctttcaattgagcttattaactttgctgtatctttaaaccagatccacaagtcggtgtaca

SEQ ID NO: 24269 - DNA, 639 bp, synthetic construct
  source 1..639: mol_type = other DNA
aggacctttacacggagtagatggtgttcccttcccccgtaacttagaagcatgaaccaaccgaccaatagtggcgttgcatccagcagcgcagcggtcaagcacttctgtttccccggcgcgaagcgtcgttacccgcccagcctactgcgggaagcctagtagcaccccaattgatcgcgcggttgcgttcagccacaaccccagtggtagctctgaggaatggagctcgccgtccccccacagcaatgtggtggcttgctcgcgcgtgtcctcgggttcactcaaagagtgttcaccgcaacatcaagtaaggtgtgaagagcctactgcgctaggctggttttcctccggagccgtgaatgctgctaatcccaacctccgagcgtgtgcgcacaatccagtgttgctacgtcgtaacgcgtaagtcggaggcggaacagactactttcggtactccgtgtttccttattttgtttcaatattttatggtgacattgactgatatctgtgaatttgctcgctgcccctgaatattgccttatattacttaatagcatttcacgaaaacgacccagctttcaattgagcttattaactttgctgtatctttaaaccagatccacaagtcggtgtaca

SEQ ID NO: 24270 - DNA, 589 bp, synthetic construct
  source 1..589: mol_type = other DNA
catgaaccaaccgaccaatagtggcgttgcatccagcagcgcagcggtcaagcacttctgtttccccggcgcgaagcgtcgttacccgcccagcctactgcgggaagcctagtagcaccccaattgatcgcgcggttgcgttcagccacaaccccagtggtagctctgaggaatggagctcgccgtccccccacagcaatgtggtggcttgctcgcgcgtgtcctcgggttcactcaaagagtgttcaccgcaacatcaagtaaggtgtgaagagcctactgcgctaggctggttttcctccggagccgtgaatgctgctaatcccaacctccgagcgtgtgcgcacaatccagtgttgctacgtcgtaacgcgtaagtcggaggcggaacagactactttcggtactccgtgtttccttattttgtttcaatattttatggtgacattgactgatatctgtgaatttgctcgctgcccctgaatattgccttatattacttaatagcatttcacgaaaacgacccagctttcaattgagcttattaactttgctgtatctttaaaccagatccacaagtcggtgtaca

SEQ ID NO: 24271 - DNA, 539 bp, synthetic construct
  source 1..539: mol_type = other DNA
agcacttctgtttccccggcgcgaagcgtcgttacccgcccagcctactgcgggaagcctagtagcaccccaattgatcgcgcggttgcgttcagccacaaccccagtggtagctctgaggaatggagctcgccgtccccccacagcaatgtggtggcttgctcgcgcgtgtcctcgggttcactcaaagagtgttcaccgcaacatcaagtaaggtgtgaagagcctactgcgctaggctggttttcctccggagccgtgaatgctgctaatcccaacctccgagcgtgtgcgcacaatccagtgttgctacgtcgtaacgcgtaagtcggaggcggaacagactactttcggtactccgtgtttccttattttgtttcaatattttatggtgacattgactgatatctgtgaatttgctcgctgcccctgaatattgccttatattacttaatagcatttcacgaaaacgacccagctttcaattgagcttattaactttgctgtatctttaaaccagatccacaagtcggtgtaca

SEQ ID NO: 24272 - DNA, 751 bp, synthetic construct
  source 1..751: mol_type = other DNA
ccctttcataacccctcccctaattcccaccttgcaaccatacgctttactccgcttcgggttttgcggcccgatgtcgtgaagaaacggttacgcaaacttagtggcgaacggggcctgccaccataagtggccccattagaagaatgtacgatccgcccagtaggcggccaccatccaggtggtttacgggcaagcacttctgtttccccggtgacgttacataggatgtccccacgtctgaaagtgactgatccgttacccgcctcaccactgcgagacggttagtacgatgtaatagctgatcaccgttgatccgggcgttttccccccgcccagaaacatgtgatgaggagcggcatccctcctatggcaacatagggcctctcctgcgttggcacgtgggctccttgagcacggtgtgatgtgaaagtcatccgaagaccttattgcgctggtgttgagtcctccgcccccctgaatgcggctaatcctaactccggatcatccgccggcaagcccgccggtagggtgtcgtaacgcgtaagtctggagcggaaccgactactttgggtgtggcgtgtttccttatttgtttggttgattgcatatggtgacaattcgttgtattgacgtttgccacttcccctgcaaatattaccaaaccaggtgctgtttttgtgctaactcctgccttactattaccaagaaattttcagagtcacttattccctcggttgtttggagcata

SEQ ID NO: 24273 - DNA, 701 bp, synthetic construct
  source 1..701: mol_type = other DNA
tccgcttcgggttttgcggcccgatgtcgtgaagaaacggttacgcaaacttagtggcgaacggggcctgccaccataagtggccccattagaagaatgtacgatccgcccagtaggcggccaccatccaggtggtttacgggcaagcacttctgtttccccggtgacgttacataggatgtccccacgtctgaaagtgactgatccgttacccgcctcaccactgcgagacggttagtacgatgtaatagctgatcaccgttgatccgggcgttttccccccgcccagaaacatgtgatgaggagcggcatccctcctatggcaacatagggcctctcctgcgttggcacgtgggctccttgagcacggtgtgatgtgaaagtcatccgaagaccttattgcgctggtgttgagtcctccgcccccctgaatgcggctaatcctaactccggatcatccgccggcaagcccgccggtagggtgtcgtaacgcgtaagtctggagcggaaccgactactttgggtgtggcgtgtttccttatttgtttggttgattgcatatggtgacaattcgttgtattgacgtttgccacttcccctgcaaatattaccaaaccaggtgctgtttttgtgctaactcctgccttactattaccaagaaattttcagagtcacttattccctcggttgtttggagcata

SEQ ID NO: 24274 - DNA, 651 bp, synthetic construct
  source 1..651: mol_type = other DNA
ttagtggcgaacggggcctgccaccataagtggccccattagaagaatgtacgatccgcccagtaggcggccaccatccaggtggtttacgggcaagcacttctgtttccccggtgacgttacataggatgtccccacgtctgaaagtgactgatccgttacccgcctcaccactgcgagacggttagtacgatgtaatagctgatcaccgttgatccgggcgttttccccccgcccagaaacatgtgatgaggagcggcatccctcctatggcaacatagggcctctcctgcgttggcacgtgggctccttgagcacggtgtgatgtgaaagtcatccgaagaccttattgcgctggtgttgagtcctccgcccccctgaatgcggctaatcctaactccggatcatccgccggcaagcccgccggtagggtgtcgtaacgcgtaagtctggagcggaaccgactactttgggtgtggcgtgtttccttatttgtttggttgattgcatatggtgacaattcgttgtattgacgtttgccacttcccctgcaaatattaccaaaccaggtgctgtttttgtgctaactcctgccttactattaccaagaaattttcagagtcacttattccctcggttgtttggagcata

SEQ ID NO: 24275 - DNA, 601 bp, synthetic construct
  source 1..601: mol_type = other DNA
acgatccgcccagtaggcggccaccatccaggtggtttacgggcaagcacttctgtttccccggtgacgttacataggatgtccccacgtctgaaagtgactgatccgttacccgcctcaccactgcgagacggttagtacgatgtaatagctgatcaccgttgatccgggcgttttccccccgcccagaaacatgtgatgaggagcggcatccctcctatggcaacatagggcctctcctgcgttggcacgtgggctccttgagcacggtgtgatgtgaaagtcatccgaagaccttattgcgctggtgttgagtcctccgcccccctgaatgcggctaatcctaactccggatcatccgccggcaagcccgccggtagggtgtcgtaacgcgtaagtctggagcggaaccgactactttgggtgtggcgtgtttccttatttgtttggttgattgcatatggtgacaattcgttgtattgacgtttgccacttcccctgcaaatattaccaaaccaggtgctgtttttgtgctaactcctgccttactattaccaagaaattttcagagtcacttattccctcggttgtttggagcata

SEQ ID NO: 24276 - DNA, 551 bp, synthetic construct
  source 1..551: mol_type = other DNA
ttctgtttccccggtgacgttacataggatgtccccacgtctgaaagtgactgatccgttacccgcctcaccactgcgagacggttagtacgatgtaatagctgatcaccgttgatccgggcgttttccccccgcccagaaacatgtgatgaggagcggcatccctcctatggcaacatagggcctctcctgcgttggcacgtgggctccttgagcacggtgtgatgtgaaagtcatccgaagaccttattgcgctggtgttgagtcctccgcccccctgaatgcggctaatcctaactccggatcatccgccggcaagcccgccggtagggtgtcgtaacgcgtaagtctggagcggaaccgactactttgggtgtggcgtgtttccttatttgtttggttgattgcatatggtgacaattcgttgtattgacgtttgccacttcccctgcaaatattaccaaaccaggtgctgtttttgtgctaactcctgccttactattaccaagaaattttcagagtcacttattccctcggttgtttggagcata

SEQ ID NO: 24277 - DNA, 501 bp, synthetic construct
  source 1..501: mol_type = other DNA
ctgatccgttacccgcctcaccactgcgagacggttagtacgatgtaatagctgatcaccgttgatccgggcgttttccccccgcccagaaacatgtgatgaggagcggcatccctcctatggcaacatagggcctctcctgcgttggcacgtgggctccttgagcacggtgtgatgtgaaagtcatccgaagaccttattgcgctggtgttgagtcctccgcccccctgaatgcggctaatcctaactccggatcatccgccggcaagcccgccggtagggtgtcgtaacgcgtaagtctggagcggaaccgactactttgggtgtggcgtgtttccttatttgtttggttgattgcatatggtgacaattcgttgtattgacgtttgccacttcccctgcaaatattaccaaaccaggtgctgtttttgtgctaactcctgccttactattaccaagaaattttcagagtcacttattccctcggttgtttggagcata

SEQ ID NO: 24278 - DNA, 782 bp, synthetic construct
  source 1..782: mol_type = other DNA
gccttgccgctatacacacccaaccaatcgattcggccccacgtgtatagccccttggtcaagtgacctcttacgtctggacgcggatttaagacctgaatatccgctgaaagttaacaccatgtttgccccgattatgtgatgtttctgctcttgctgggcggaacatccgtcgggatgccaaagcaatttgtgtccccttctttctttggacttcggtcccccggtcgaagccgcttggaataagacagggttattttccctccttcctctcttctactttgttaagctctatttaacaaaagggtatgtctggcccctcccttcttggggaatgtgcgcggcggtctttccgtctctcgaaaagcgtgcatgccagatgcaagagaaggtgaagaaagtaagttgtgtctaacgttaagacaggaacgaatgtgtctgtagcgacctctcaaaggctgcggtctccccacctggtaacaggtgccgcagcggccaaaagccacgtggttaacagccacctttgagagcggtgcaaccccagcaccacactttcgttgttgttttctcactaaccacaactcgcttctctgaagccctcttgtagagttgccaagaatgtccagaaggtaccccggtccacgggatctgatctggagctccatgcgtgtgctctacacacgttcgggagttaaaaactgtcacagcaactccaaactaggtggtcctagttttcacttttatttgtcaagtcatatggtgatggttaaaggagaacgaca

SEQ ID NO: 24279 - DNA, 732 bp, synthetic construct
  source 1..732: mol_type = other DNA
ccccttggtcaagtgacctcttacgtctggacgcggatttaagacctgaatatccgctgaaagttaacaccatgtttgccccgattatgtgatgtttctgctcttgctgggcggaacatccgtcgggatgccaaagcaatttgtgtccccttctttctttggacttcggtcccccggtcgaagccgcttggaataagacagggttattttccctccttcctctcttctactttgttaagctctatttaacaaaagggtatgtctggcccctcccttcttggggaatgtgcgcggcggtctttccgtctctcgaaaagcgtgcatgccagatgcaagagaaggtgaagaaagtaagttgtgtctaacgttaagacaggaacgaatgtgtctgtagcgacctctcaaaggctgcggtctccccacctggtaacaggtgccgcagcggccaaaagccacgtggttaacagccacctttgagagcggtgcaaccccagcaccacactttcgttgttgttttctcactaaccacaactcgcttctctgaagccctcttgtagagttgccaagaatgtccagaaggtaccccggtccacgggatctgatctggagctccatgcgtgtgctctacacacgttcgggagttaaaaactgtcacagcaactccaaactaggtggtcctagttttcacttttatttgtcaagtcatatggtgatggttaaaggagaacgaca

SEQ ID NO: 24280 - DNA, 682 bp, synthetic construct
  source 1..682: mol_type = other DNA
tatccgctgaaagttaacaccatgtttgccccgattatgtgatgtttctgctcttgctgggcggaacatccgtcgggatgccaaagcaatttgtgtccccttctttctttggacttcggtcccccggtcgaagccgcttggaataagacagggttattttccctccttcctctcttctactttgttaagctctatttaacaaaagggtatgtctggcccctcccttcttggggaatgtgcgcggcggtctttccgtctctcgaaaagcgtgcatgccagatgcaagagaaggtgaagaaagtaagttgtgtctaacgttaagacaggaacgaatgtgtctgtagcgacctctcaaaggctgcggtctccccacctggtaacaggtgccgcagcggccaaaagccacgtggttaacagccacctttgagagcggtgcaaccccagcaccacactttcgttgttgttttctcactaaccacaactcgcttctctgaagccctcttgtagagttgccaagaatgtccagaaggtaccccggtccacgggatctgatctggagctccatgcgtgtgctctacacacgttcgggagttaaaaactgtcacagcaactccaaactaggtggtcctagttttcacttttatttgtcaagtcatatggtgatggttaaaggagaacgaca

SEQ ID NO: 24281 - DNA, 632 bp, synthetic construct
  source 1..632: mol_type = other DNA
ctcttgctgggcggaacatccgtcgggatgccaaagcaatttgtgtccccttctttctttggacttcggtcccccggtcgaagccgcttggaataagacagggttattttccctccttcctctcttctactttgttaagctctatttaacaaaagggtatgtctggcccctcccttcttggggaatgtgcgcggcggtctttccgtctctcgaaaagcgtgcatgccagatgcaagagaaggtgaagaaagtaagttgtgtctaacgttaagacaggaacgaatgtgtctgtagcgacctctcaaaggctgcggtctccccacctggtaacaggtgccgcagcggccaaaagccacgtggttaacagccacctttgagagcggtgcaaccccagcaccacactttcgttgttgttttctcactaaccacaactcgcttctctgaagccctcttgtagagttgccaagaatgtccagaaggtaccccggtccacgggatctgatctggagctccatgcgtgtgctctacacacgttcgggagttaaaaactgtcacagcaactccaaactaggtggtcctagttttcacttttatttgtcaagtcatatggtgatggttaaaggagaacgaca

SEQ ID NO: 24282 - DNA, 582 bp, synthetic construct
  source 1..582: mol_type = other DNA
ttctttctttggacttcggtcccccggtcgaagccgcttggaataagacagggttattttccctccttcctctcttctactttgttaagctctatttaacaaaagggtatgtctggcccctcccttcttggggaatgtgcgcggcggtctttccgtctctcgaaaagcgtgcatgccagatgcaagagaaggtgaagaaagtaagttgtgtctaacgttaagacaggaacgaatgtgtctgtagcgacctctcaaaggctgcggtctccccacctggtaacaggtgccgcagcggccaaaagccacgtggttaacagccacctttgagagcggtgcaaccccagcaccacactttcgttgttgttttctcactaaccacaactcgcttctctgaagccctcttgtagagttgccaagaatgtccagaaggtaccccggtccacgggatctgatctggagctccatgcgtgtgctctacacacgttcgggagttaaaaactgtcacagcaactccaaactaggtggtcctagttttcacttttatttgtcaagtcatatggtgatggttaaaggagaacgaca

SEQ ID NO: 24283 - DNA, 532 bp, synthetic construct
  source 1..532: mol_type = other DNA
gggttattttccctccttcctctcttctactttgttaagctctatttaacaaaagggtatgtctggcccctcccttcttggggaatgtgcgcggcggtctttccgtctctcgaaaagcgtgcatgccagatgcaagagaaggtgaagaaagtaagttgtgtctaacgttaagacaggaacgaatgtgtctgtagcgacctctcaaaggctgcggtctccccacctggtaacaggtgccgcagcggccaaaagccacgtggttaacagccacctttgagagcggtgcaaccccagcaccacactttcgttgttgttttctcactaaccacaactcgcttctctgaagccctcttgtagagttgccaagaatgtccagaaggtaccccggtccacgggatctgatctggagctccatgcgtgtgctctacacacgttcgggagttaaaaactgtcacagcaactccaaactaggtggtcctagttttcacttttatttgtcaagtcatatggtgatggttaaaggagaacgaca

SEQ ID NO: 24284 - DNA, 673 bp, synthetic construct
  source 1..673: mol_type = other DNA
actccattcagcttcttcggaacctgttcggaggaattaaacgggcacccatactccccccaccccccttttgtaactaagtatgtgtgctcgtgatcttgactcccacggaacggaccgatccgttggtgaacaaacagctaggtccacatcctcccttcccctgggagggcccccgccctcccacatcctccccccagcctgacgtatcacaggctgtgtgaagcccccgcgaaagctgctcacgtggcaattgtgggtccccccttcatcaagacaccaggtctttcctccttaaggctagccccggcgtgtgaattcacgttgggcaactagtggtgtcactgtgcgctcccaatctcggccgcggagtgctgttccccaagccaaacccctggcccttcactatgtgcctggcaagcatatctgagaaggtgttccgctgtggctgccaacctggtgacaggtgccccagtgtgcgtaaccttcttccgtctccggacggtagtgattggttaagatttggtgtaaggttcatgtgccaacgccctgtgcgggatgaaacctctactgccctaggaatgccaggcaggtaccccacctccgggtgggatctgagcctgggctaattgtctacgggtagtttcatttccaatccttttatgtcggagtc

SEQ ID NO: 24285 - DNA, 623 bp, synthetic construct
  source 1..623: mol_type = other DNA
atactccccccaccccccttttgtaactaagtatgtgtgctcgtgatcttgactcccacggaacggaccgatccgttggtgaacaaacagctaggtccacatcctcccttcccctgggagggcccccgccctcccacatcctccccccagcctgacgtatcacaggctgtgtgaagcccccgcgaaagctgctcacgtggcaattgtgggtccccccttcatcaagacaccaggtctttcctccttaaggctagccccggcgtgtgaattcacgttgggcaactagtggtgtcactgtgcgctcccaatctcggccgcggagtgctgttccccaagccaaacccctggcccttcactatgtgcctggcaagcatatctgagaaggtgttccgctgtggctgccaacctggtgacaggtgccccagtgtgcgtaaccttcttccgtctccggacggtagtgattggttaagatttggtgtaaggttcatgtgccaacgccctgtgcgggatgaaacctctactgccctaggaatgccaggcaggtaccccacctccgggtgggatctgagcctgggctaattgtctacgggtagtttcatttccaatccttttatgtcggagtc

SEQ ID NO: 24286 - DNA, 573 bp, synthetic construct
  source 1..573: mol_type = other DNA
gactcccacggaacggaccgatccgttggtgaacaaacagctaggtccacatcctcccttcccctgggagggcccccgccctcccacatcctccccccagcctgacgtatcacaggctgtgtgaagcccccgcgaaagctgctcacgtggcaattgtgggtccccccttcatcaagacaccaggtctttcctccttaaggctagccccggcgtgtgaattcacgttgggcaactagtggtgtcactgtgcgctcccaatctcggccgcggagtgctgttccccaagccaaacccctggcccttcactatgtgcctggcaagcatatctgagaaggtgttccgctgtggctgccaacctggtgacaggtgccccagtgtgcgtaaccttcttccgtctccggacggtagtgattggttaagatttggtgtaaggttcatgtgccaacgccctgtgcgggatgaaacctctactgccctaggaatgccaggcaggtaccccacctccgggtgggatctgagcctgggctaattgtctacgggtagtttcatttccaatccttttatgtcggagtc

SEQ ID NO: 24287 - DNA, 523 bp, synthetic construct
  source 1..523: mol_type = other DNA
atcctcccttcccctgggagggcccccgccctcccacatcctccccccagcctgacgtatcacaggctgtgtgaagcccccgcgaaagctgctcacgtggcaattgtgggtccccccttcatcaagacaccaggtctttcctccttaaggctagccccggcgtgtgaattcacgttgggcaactagtggtgtcactgtgcgctcccaatctcggccgcggagtgctgttccccaagccaaacccctggcccttcactatgtgcctggcaagcatatctgagaaggtgttccgctgtggctgccaacctggtgacaggtgccccagtgtgcgtaaccttcttccgtctccggacggtagtgattggttaagatttggtgtaaggttcatgtgccaacgccctgtgcgggatgaaacctctactgccctaggaatgccaggcaggtaccccacctccgggtgggatctgagcctgggctaattgtctacgggtagtttcatttccaatccttttatgtcggagtc

SEQ ID NO: 24288 - DNA, 662 bp, synthetic construct
  source 1..662: mol_type = other DNA
cttcttcggaacctgttcggaggaattaaacgggcacccatactccccccacccccctttggtaactaagtatgtgtgctcgtgatcttggctcccacggagcggaccgatccgttggtgaacaaacagctaggtccacatcctcccttcccctgggagggcccccgccctcccacatcctccccccagcctgacgtatcacaggctgtgtgaagcccccgcgaaagctgctcacgtggcaattgtgggtccccccttcatcaagacaccaggtctttcctccttaaggctagccccggcgtgtgaattcacgttgggcaactagtggtgtcactgtgcgctcccaatctcggccgcggagtgctgttccccaagccaaacccctggcccttcactatgtgcctggcaagcatatctgagaaggtgttccgctgtggctgccaacctggtaacaggtgccccagtgtgcgtaaccttcttccgtctccggacggtagtgattggttaagatttggtgtaaggttcatgtgccaacgccctgtgcgggatgaaacctctactgccctaggaatgccaggcaggtaccccacctccgggtgggatctgagcctgggctaattgtctacgggtagtttcatttccaatccttttatgtcggagtc

SEQ ID NO: 24289 - DNA, 612 bp, synthetic construct
  source 1..612: mol_type = other DNA
acccccctttggtaactaagtatgtgtgctcgtgatcttggctcccacggagcggaccgatccgttggtgaacaaacagctaggtccacatcctcccttcccctgggagggcccccgccctcccacatcctccccccagcctgacgtatcacaggctgtgtgaagcccccgcgaaagctgctcacgtggcaattgtgggtccccccttcatcaagacaccaggtctttcctccttaaggctagccccggcgtgtgaattcacgttgggcaactagtggtgtcactgtgcgctcccaatctcggccgcggagtgctgttccccaagccaaacccctggcccttcactatgtgcctggcaagcatatctgagaaggtgttccgctgtggctgccaacctggtaacaggtgccccagtgtgcgtaaccttcttccgtctccggacggtagtgattggttaagatttggtgtaaggttcatgtgccaacgccctgtgcgggatgaaacctctactgccctaggaatgccaggcaggtaccccacctccgggtgggatctgagcctgggctaattgtctacgggtagtttcatttccaatccttttatgtcggagtc

SEQ ID NO: 24290 - DNA, 562 bp, synthetic construct
  source 1..562: mol_type = other DNA
agcggaccgatccgttggtgaacaaacagctaggtccacatcctcccttcccctgggagggcccccgccctcccacatcctccccccagcctgacgtatcacaggctgtgtgaagcccccgcgaaagctgctcacgtggcaattgtgggtccccccttcatcaagacaccaggtctttcctccttaaggctagccccggcgtgtgaattcacgttgggcaactagtggtgtcactgtgcgctcccaatctcggccgcggagtgctgttccccaagccaaacccctggcccttcactatgtgcctggcaagcatatctgagaaggtgttccgctgtggctgccaacctggtaacaggtgccccagtgtgcgtaaccttcttccgtctccggacggtagtgattggttaagatttggtgtaaggttcatgtgccaacgccctgtgcgggatgaaacctctactgccctaggaatgccaggcaggtaccccacctccgggtgggatctgagcctgggctaattgtctacgggtagtttcatttccaatccttttatgtcggagtc

SEQ ID NO: 24291 - DNA, 512 bp, synthetic construct
  source 1..512: mol_type = other DNA
ccctgggagggcccccgccctcccacatcctccccccagcctgacgtatcacaggctgtgtgaagcccccgcgaaagctgctcacgtggcaattgtgggtccccccttcatcaagacaccaggtctttcctccttaaggctagccccggcgtgtgaattcacgttgggcaactagtggtgtcactgtgcgctcccaatctcggccgcggagtgctgttccccaagccaaacccctggcccttcactatgtgcctggcaagcatatctgagaaggtgttccgctgtggctgccaacctggtaacaggtgccccagtgtgcgtaaccttcttccgtctccggacggtagtgattggttaagatttggtgtaaggttcatgtgccaacgccctgtgcgggatgaaacctctactgccctaggaatgccaggcaggtaccccacctccgggtgggatctgagcctgggctaattgtctacgggtagtttcatttccaatccttttatgtcggagtc

SEQ ID NO: 24292 - DNA, 627 bp, synthetic construct
  source 1..627: mol_type = other DNA
cccatacacccccacccccttttctgcaacttaagtatgtgtgctcgtaatcttgactcccacggaacggatcgatccgctggagaacaaactgctagatccacatcctcccttcccctgggaggaccccggtcctcccacatcctccccccagcctgacgtaacacaggctgtgtgaagtccccgcgaaagctgctcacgtggcaattgtgggtccccccttcaccaagacaccaggtctttcctccttaaggctagccccgatgtgtgaattcacattgggcaactagtggtgtcactgtgcgctcccaatctcggccgcggagtgctgttccccaagccaaacccctggcccttcactatgtgcctggcaagcatatctgagaaggtgttccgctgtggctgccagcctggtaacaggtgccccagtgtgcgtaaccttcttccgtctccggacggtagtgattggttaagatttggtgtaaggttcatgtgccaacgccctgtgcgggatgaaacctctactgccctaggaatgccaggcaggtaccccaccttcgggtgggatctgagcctgggctaattgtctacgggtagtttcatttccaattcttttatgtcggagtc

SEQ ID NO: 24293 - DNA, 577 bp, synthetic construct
  source 1..577: mol_type = other DNA
tcttgactcccacggaacggatcgatccgctggagaacaaactgctagatccacatcctcccttcccctgggaggaccccggtcctcccacatcctccccccagcctgacgtaacacaggctgtgtgaagtccccgcgaaagctgctcacgtggcaattgtgggtccccccttcaccaagacaccaggtctttcctccttaaggctagccccgatgtgtgaattcacattgggcaactagtggtgtcactgtgcgctcccaatctcggccgcggagtgctgttccccaagccaaacccctggcccttcactatgtgcctggcaagcatatctgagaaggtgttccgctgtggctgccagcctggtaacaggtgccccagtgtgcgtaaccttcttccgtctccggacggtagtgattggttaagatttggtgtaaggttcatgtgccaacgccctgtgcgggatgaaacctctactgccctaggaatgccaggcaggtaccccaccttcgggtgggatctgagcctgggctaattgtctacgggtagtttcatttccaattcttttatgtcggagtc

SEQ ID NO: 24294 - DNA, 527 bp, synthetic construct
  source 1..527: mol_type = other DNA
ccacatcctcccttcccctgggaggaccccggtcctcccacatcctccccccagcctgacgtaacacaggctgtgtgaagtccccgcgaaagctgctcacgtggcaattgtgggtccccccttcaccaagacaccaggtctttcctccttaaggctagccccgatgtgtgaattcacattgggcaactagtggtgtcactgtgcgctcccaatctcggccgcggagtgctgttccccaagccaaacccctggcccttcactatgtgcctggcaagcatatctgagaaggtgttccgctgtggctgccagcctggtaacaggtgccccagtgtgcgtaaccttcttccgtctccggacggtagtgattggttaagatttggtgtaaggttcatgtgccaacgccctgtgcgggatgaaacctctactgccctaggaatgccaggcaggtaccccaccttcgggtgggatctgagcctgggctaattgtctacgggtagtttcatttccaattcttttatgtcggagtc

SEQ ID NO: 24295 - DNA, 579 bp, synthetic construct
  source 1..579: mol_type = other DNA
aatcttgactcccacggaatggatcgatccgctggagaacaaactgctagatccacatcctccctccccttgggaggacctcggtcctcccacatcctccctccagcctgacgtatcacaggctgtgtgaagcccccgcgaaagctgctcacgtggcaattgtgggtccccccttcatcaagacaccaggtctttcctccttaaggctagccccgatgtgtgaattcacattgggcaactagtggtgtcactgtgcgctcccaatctcggccgcggagtgctgttccccaagccaaacccctggcccttcactatgtgcctggcaagcatatctgagaaggtgttccgctgtggctgccagcctggtaacaggtgccccagtgtgcgtaaccttcttccgtctccggacggtagtgattggttaagatttggtgtaaggttcatgtgccaacgccctgtgcgggatgaaacctctactgccctaggaatgccaggcaggtaccccaccttcgggtgggatctgagcctgggctaattgtctacgggtagtttcatttccaattcttttatgctggagtc

SEQ ID NO: 24296 - DNA, 529 bp, synthetic construct
  source 1..529: mol_type = other DNA
atccacatcctccctccccttgggaggacctcggtcctcccacatcctccctccagcctgacgtatcacaggctgtgtgaagcccccgcgaaagctgctcacgtggcaattgtgggtccccccttcatcaagacaccaggtctttcctccttaaggctagccccgatgtgtgaattcacattgggcaactagtggtgtcactgtgcgctcccaatctcggccgcggagtgctgttccccaagccaaacccctggcccttcactatgtgcctggcaagcatatctgagaaggtgttccgctgtggctgccagcctggtaacaggtgccccagtgtgcgtaaccttcttccgtctccggacggtagtgattggttaagatttggtgtaaggttcatgtgccaacgccctgtgcgggatgaaacctctactgccctaggaatgccaggcaggtaccccaccttcgggtgggatctgagcctgggctaattgtctacgggtagtttcatttccaattcttttatgctggagtc

SEQ ID NO: 24297 - DNA, 675 bp, synthetic construct
  source 1..675: mol_type = other DNA
actccattcagcttcttcggaacctgttcggaggaattaaacgggcacccactttcctgtcctctccccctttctgcaactcaagtgtgtgctcgtaatcctgactcccacgggttgaccgccccgttggtgaacaaacagctaggtcattccctccctacccctgggcgccatttcagtggcgttcatatcctccccccagcctgacgtgtcacaggctgtgcaaagtccccgcgaaagctgctcacgtggcaattgtgggtcccccctttgtgaaggaaccgagtctttctcccttaaggctagacccctgtgtgaactcacaggtggcaactagtggttccactgcatgctcccgacctcggccgcggagtgctgttccccaagtcgtgacactgacctccacttatgtgcctggcaagcatatctgagaagatgttccgctgtggctgccaaacctggtaacaggtgccccagtgcgtgtagtcttcttccgtctccggacggtaagtgtgtggtaaagatgcggcgtaaggttcaagtgccaacgccctggaagggatgacccttctactgccctaggaatgccgcgcaggtaccccaggttcgcctgggatctgagcgcgggctaattgtctacgggtagtttcatttccctctcttttcactggcatc

SEQ ID NO: 24298 - DNA, 625 bp, synthetic construct
  source 1..625: mol_type = other DNA
actttcctgtcctctccccctttctgcaactcaagtgtgtgctcgtaatcctgactcccacgggttgaccgccccgttggtgaacaaacagctaggtcattccctccctacccctgggcgccatttcagtggcgttcatatcctccccccagcctgacgtgtcacaggctgtgcaaagtccccgcgaaagctgctcacgtggcaattgtgggtcccccctttgtgaaggaaccgagtctttctcccttaaggctagacccctgtgtgaactcacaggtggcaactagtggttccactgcatgctcccgacctcggccgcggagtgctgttccccaagtcgtgacactgacctccacttatgtgcctggcaagcatatctgagaagatgttccgctgtggctgccaaacctggtaacaggtgccccagtgcgtgtagtcttcttccgtctccggacggtaagtgtgtggtaaagatgcggcgtaaggttcaagtgccaacgccctggaagggatgacccttctactgccctaggaatgccgcgcaggtaccccaggttcgcctgggatctgagcgcgggctaattgtctacgggtagtttcatttccctctcttttcactggcatc

SEQ ID NO: 24299 - DNA, 575 bp, synthetic construct
  source 1..575: mol_type = other DNA
ctgactcccacgggttgaccgccccgttggtgaacaaacagctaggtcattccctccctacccctgggcgccatttcagtggcgttcatatcctccccccagcctgacgtgtcacaggctgtgcaaagtccccgcgaaagctgctcacgtggcaattgtgggtcccccctttgtgaaggaaccgagtctttctcccttaaggctagacccctgtgtgaactcacaggtggcaactagtggttccactgcatgctcccgacctcggccgcggagtgctgttccccaagtcgtgacactgacctccacttatgtgcctggcaagcatatctgagaagatgttccgctgtggctgccaaacctggtaacaggtgccccagtgcgtgtagtcttcttccgtctccggacggtaagtgtgtggtaaagatgcggcgtaaggttcaagtgccaacgccctggaagggatgacccttctactgccctaggaatgccgcgcaggtaccccaggttcgcctgggatctgagcgcgggctaattgtctacgggtagtttcatttccctctcttttcactggcatc

SEQ ID NO: 24300 - DNA, 525 bp, synthetic construct
  source 1..525: mol_type = other DNA
tccctccctacccctgggcgccatttcagtggcgttcatatcctccccccagcctgacgtgtcacaggctgtgcaaagtccccgcgaaagctgctcacgtggcaattgtgggtcccccctttgtgaaggaaccgagtctttctcccttaaggctagacccctgtgtgaactcacaggtggcaactagtggttccactgcatgctcccgacctcggccgcggagtgctgttccccaagtcgtgacactgacctccacttatgtgcctggcaagcatatctgagaagatgttccgctgtggctgccaaacctggtaacaggtgccccagtgcgtgtagtcttcttccgtctccggacggtaagtgtgtggtaaagatgcggcgtaaggttcaagtgccaacgccctggaagggatgacccttctactgccctaggaatgccgcgcaggtaccccaggttcgcctgggatctgagcgcgggctaattgtctacgggtagtttcatttccctctcttttcactggcatc

SEQ ID NO: 24301 - DNA, 560 bp, synthetic construct; identical to SEQ ID NO: 22613
  source 1..560: mol_type = other DNA

SEQ ID NO: 24302 - DNA, 510 bp, synthetic construct; identical to SEQ ID NO: 22614
  source 1..510: mol_type = other DNA

SEQ ID NO: 24303 - DNA, 661 bp, synthetic construct
  source 1..661: mol_type = other DNA
cttcttcggaacctgttcggaggaattaaacgggcacccactcaccccctctccctcctcgtaactaagtgtgtgcccagtctctttactcctgctggcttcaccgaccagtagtggccaaaatgctaggtgaacctcctccctcccccactgggctcccgcccagtttcctccccccagcctgacgtgtcacaggctgtgcaaagaccccgcgaaagctgccaaaagtggcaattgtgggtcccccctttgtcaaggcgtcgagtctttctcccttaaggctagccccgtcagtgaattctgtcgggcaactagtgacgccactgcatgcctccgacctcggccgcggagtgctgccccccaagtcatgcccctgaccacaagttgtgctgtctggcaaacattgtctgtgagaatgttccgctgtggctgccaagcctggtaacaggctgccccagtgtgtgtagttctcatccggacttcggtctggcaacttgctgttaagacatggcgtaaggggcgtgtgccaacgccctggaacgagtgtccactctaataccccgaggaatgctacgcaggtacccctggcctgccagggatctgagcgtaggctaattgtctaagggtattttcatttcccactctttctttcttgttcata

SEQ ID NO: 24304 - DNA, 611 bp, synthetic construct
  source 1..611: mol_type = other DNA
ctccctcctcgtaactaagtgtgtgcccagtctctttactcctgctggcttcaccgaccagtagtggccaaaatgctaggtgaacctcctccctcccccactgggctcccgcccagtttcctccccccagcctgacgtgtcacaggctgtgcaaagaccccgcgaaagctgccaaaagtggcaattgtgggtcccccctttgtcaaggcgtcgagtctttctcccttaaggctagccccgtcagtgaattctgtcgggcaactagtgacgccactgcatgcctccgacctcggccgcggagtgctgccccccaagtcatgcccctgaccacaagttgtgctgtctggcaaacattgtctgtgagaatgttccgctgtggctgccaagcctggtaacaggctgccccagtgtgtgtagttctcatccggacttcggtctggcaacttgctgttaagacatggcgtaaggggcgtgtgccaacgccctggaacgagtgtccactctaataccccgaggaatgctacgcaggtacccctggcctgccagggatctgagcgtaggctaattgtctaagggtattttcatttcccactctttctttcttgttcata

SEQ ID NO: 24305 - DNA, 561 bp, synthetic construct
  source 1..561: mol_type = other DNA
tcaccgaccagtagtggccaaaatgctaggtgaacctcctccctcccccactgggctcccgcccagtttcctccccccagcctgacgtgtcacaggctgtgcaaagaccccgcgaaagctgccaaaagtggcaattgtgggtcccccctttgtcaaggcgtcgagtctttctcccttaaggctagccccgtcagtgaattctgtcgggcaactagtgacgccactgcatgcctccgacctcggccgcggagtgctgccccccaagtcatgcccctgaccacaagttgtgctgtctggcaaacattgtctgtgagaatgttccgctgtggctgccaagcctggtaacaggctgccccagtgtgtgtagttctcatccggacttcggtctggcaacttgctgttaagacatggcgtaaggggcgtgtgccaacgccctggaacgagtgtccactctaataccccgaggaatgctacgcaggtacccctggcctgccagggatctgagcgtaggctaattgtctaagggtattttcatttcccactctttctttcttgttcata

SEQ ID NO: 24306 - DNA, 511 bp, synthetic construct
  source 1..511: mol_type = other DNA
ctgggctcccgcccagtttcctccccccagcctgacgtgtcacaggctgtgcaaagaccccgcgaaagctgccaaaagtggcaattgtgggtcccccctttgtcaaggcgtcgagtctttctcccttaaggctagccccgtcagtgaattctgtcgggcaactagtgacgccactgcatgcctccgacctcggccgcggagtgctgccccccaagtcatgcccctgaccacaagttgtgctgtctggcaaacattgtctgtgagaatgttccgctgtggctgccaagcctggtaacaggctgccccagtgtgtgtagttctcatccggacttcggtctggcaacttgctgttaagacatggcgtaaggggcgtgtgccaacgccctggaacgagtgtccactctaataccccgaggaatgctacgcaggtacccctggcctgccagggatctgagcgtaggctaattgtctaagggtattttcatttcccactctttctttcttgttcata

SEQ ID NO: 24307 - DNA, 663 bp, synthetic construct; identical to SEQ ID NO: 22873
  source 1..663: mol_type = other DNA

SEQ ID NO: 24308 - DNA, 613 bp, synthetic construct; identical to SEQ ID NO: 22874
  source 1..613: mol_type = other DNA

SEQ ID NO: 24309 - DNA, 563 bp, synthetic construct; identical to SEQ ID NO: 22875
  source 1..563: mol_type = other DNA

SEQ ID NO: 24310 - DNA, 513 bp, synthetic construct; identical to SEQ ID NO: 22876
  source 1..513: mol_type = other DNA

SEQ ID NO: 24311 - DNA, 662 bp, synthetic construct; identical to SEQ ID NO: 22861
  source 1..662: mol_type = other DNA

SEQ ID NO: 24312 - DNA, 612 bp, synthetic construct; identical to SEQ ID NO: 22862
  source 1..612: mol_type = other DNA

SEQ ID NO: 24313 - DNA, 562 bp, synthetic construct; identical to SEQ ID NO: 22863
  source 1..562: mol_type = other DNA

SEQ ID NO: 24314 - DNA, 512 bp, synthetic construct; identical to SEQ ID NO: 22864
  source 1..512: mol_type = other DNA

SEQ ID NO: 24315 - DNA, 661 bp, synthetic construct
  source 1..661: mol_type = other DNA
cttcttcggaacctgtttggaggaattaaacgggcacccacccaccttcacccccttttcgtaactaagtgtgtgcccaatctcatgactcctgctgacttcaccgaccagcagtgtccaaaacgctaggtgaatttccttcctccccctctgggcttctgcccagctccctccctccagcctgacgtgccacaggctgtgcaaagaccccgcgaaagctgccaaaagtggcaattgtgggtcccccctttgtaaaggcgtcgagtctttctcccttaaggctagacccgtcagtgaattctgtcgggcaactagtgacgccactgcatgcctccgacctcggccgcggagtgctgccccccaagtcgtgcccctgactacaagttgtgctgtctggcaaacattgtctgtgagaatgttccgctgtggctgccaagcctggtaacaggctgccccagtgtgcgtagttctcatccagacttcggtctggcaacttgctgttaagacacggcgtaaggggcgtgtgccaacgccctggaacgagtgtccactctaataccccgaggaatgctacgcaggtacccctggctccccagggatctgagcgtaggctaattgtctaagggtattttcatttcccactctttctttcttgttcata

SEQ ID NO: 24316 - DNA, 611 bp, synthetic construct
  source 1..611: mol_type = other DNA
cccccttttcgtaactaagtgtgtgcccaatctcatgactcctgctgacttcaccgaccagcagtgtccaaaacgctaggtgaatttccttcctccccctctgggcttctgcccagctccctccctccagcctgacgtgccacaggctgtgcaaagaccccgcgaaagctgccaaaagtggcaattgtgggtcccccctttgtaaaggcgtcgagtctttctcccttaaggctagacccgtcagtgaattctgtcgggcaactagtgacgccactgcatgcctccgacctcggccgcggagtgctgccccccaagtcgtgcccctgactacaagttgtgctgtctggcaaacattgtctgtgagaatgttccgctgtggctgccaagcctggtaacaggctgccccagtgtgcgtagttctcatccagacttcggtctggcaacttgctgttaagacacggcgtaaggggcgtgtgccaacgccctggaacgagtgtccactctaataccccgaggaatgctacgcaggtacccctggctccccagggatctgagcgtaggctaattgtctaagggtattttcatttcccactctttctttcttgttcata

SEQ ID NO: 24317 - DNA, 561 bp, synthetic construct
  source 1..561: mol_type = other DNA
tcaccgaccagcagtgtccaaaacgctaggtgaatttccttcctccccctctgggcttctgcccagctccctccctccagcctgacgtgccacaggctgtgcaaagaccccgcgaaagctgccaaaagtggcaattgtgggtcccccctttgtaaaggcgtcgagtctttctcccttaaggctagacccgtcagtgaattctgtcgggcaactagtgacgccactgcatgcctccgacctcggccgcggagtgctgccccccaagtcgtgcccctgactacaagttgtgctgtctggcaaacattgtctgtgagaatgttccgctgtggctgccaagcctggtaacaggctgccccagtgtgcgtagttctcatccagacttcggtctggcaacttgctgttaagacacggcgtaaggggcgtgtgccaacgccctggaacgagtgtccactctaataccccgaggaatgctacgcaggtacccctggctccccagggatctgagcgtaggctaattgtctaagggtattttcatttcccactctttctttcttgttcata

SEQ ID NO: 24318 - DNA, 511 bp, synthetic construct
  source 1..511: mol_type = other DNA
ctgggcttctgcccagctccctccctccagcctgacgtgccacaggctgtgcaaagaccccgcgaaagctgccaaaagtggcaattgtgggtcccccctttgtaaaggcgtcgagtctttctcccttaaggctagacccgtcagtgaattctgtcgggcaactagtgacgccactgcatgcctccgacctcggccgcggagtgctgccccccaagtcgtgcccctgactacaagttgtgctgtctggcaaacattgtctgtgagaatgttccgctgtggctgccaagcctggtaacaggctgccccagtgtgcgtagttctcatccagacttcggtctggcaacttgctgttaagacacggcgtaaggggcgtgtgccaacgccctggaacgagtgtccactctaataccccgaggaatgctacgcaggtacccctggctccccagggatctgagcgtaggctaattgtctaagggtattttcatttcccactctttctttcttgttcata

SEQ ID NO: 24319 - DNA, 596 bp, synthetic construct
  source 1..596: mol_type = other DNA
gtgtgctcgtgaccttgactcctgcgggcttcaccgacccgtccagtgaacaaactgctaggtgactccttccccccccctggcctggatggcccacatccaggtcttcttcccccagcccgacatgtcatgggctgtttggaatccccgcgaaagctgctaacgtggcaattgtgggtcccccttccaacaagacaccgagtctttctcccttaaggctagccccgtgtggtgaattccaccgggcaactagtggtgtcaatgcatgcctccgacctcggccgcggagtgctgccccccaagttgcgaaactgaccaagactgtgctgcctggcaagcatagtctgaggagatgttccgctgtggttgccaaacctggtaacaggtgccccagtgtgcgtagtctccttccggttcgtccggctgtcctttggtaaagacacaatgtaaggggcgtgtgccaacgccctggaaagagtgaacttctactgccctaggaatgccacgcaggtacccctggtttcccaccagggatctgagcgtgggctaattgtctaacgggtagtttcatttccctcctctcttttgttgacatc

SEQ ID NO: 24320 - DNA, 546 bp, synthetic construct
  source 1..546: mol_type = other DNA
caaactgctaggtgactccttccccccccctggcctggatggcccacatccaggtcttcttcccccagcccgacatgtcatgggctgtttggaatccccgcgaaagctgctaacgtggcaattgtgggtcccccttccaacaagacaccgagtctttctcccttaaggctagccccgtgtggtgaattccaccgggcaactagtggtgtcaatgcatgcctccgacctcggccgcggagtgctgccccccaagttgcgaaactgaccaagactgtgctgcctggcaagcatagtctgaggagatgttccgctgtggttgccaaacctggtaacaggtgccccagtgtgcgtagtctccttccggttcgtccggctgtcctttggtaaagacacaatgtaaggggcgtgtgccaacgccctggaaagagtgaacttctactgccctaggaatgccacgcaggtacccctggtttcccaccagggatctgagcgtgggctaattgtctaacgggtagtttcatttccctcctctcttttgttgacatc

SEQ ID NO: 24321 - DNA, 551 bp, synthetic construct
  source 1..551: mol_type = other DNA
agtgtccaaaatgctaggtggaaaatcctcccttcccctctgggctccatgcccagcatcctccccccagcctgacgtgtcacaggctgtgcaaagaccccgcgaaagctgccaaaagtggcaattgtgggtcccccctttgtcaaggcgtcgagtctttctcccttaaggctagccccgtcagtgaattctgacgggcaactagtgacgccactgcatgcctccgacctcggccgcggagtgctgccccccaagtcatgcccctgaccacaagttgtgctgtctggcaaacactgtctgtgagaatgttccgctgtggctgccaagcctggtaacaggctgccccagtgtgcgtagttctcatccagacctcggtctggcaacttgctgttaagacatggcgtaaggggcgtgtgccaacgccctggaacgagtgtccactctaataccccgaggaatgctacgcaggtacccctggttcgccagggatctgagcgtaggctaattgtctaagggtattttcatttcccactctctctttcttgttcata

SEQ ID NO: 24322 - DNA, 501 bp, synthetic construct
  source 1..501: mol_type = other DNA
gcccagcatcctccccccagcctgacgtgtcacaggctgtgcaaagaccccgcgaaagctgccaaaagtggcaattgtgggtcccccctttgtcaaggcgtcgagtctttctcccttaaggctagccccgtcagtgaattctgacgggcaactagtgacgccactgcatgcctccgacctcggccgcggagtgctgccccccaagtcatgcccctgaccacaagttgtgctgtctggcaaacactgtctgtgagaatgttccgctgtggctgccaagcctggtaacaggctgccccagtgtgcgtagttctcatccagacctcggtctggcaacttgctgttaagacatggcgtaaggggcgtgtgccaacgccctggaacgagtgtccactctaataccccgaggaatgctacgcaggtacccctggttcgccagggatctgagcgtaggctaattgtctaagggtattttcatttcccactctctctttcttgttcata

SEQ ID NO: 24323 - DNA, 551 bp, synthetic construct
  source 1..551: mol_type = other DNA
agtgtccaaaatgccaggtggaaaatcctcccttcccctctgggcttcatgcccggcatcctccccccagcctgacgtgccacaggctgtgcaaagaccccgcgaaagctgccaaaagtggcaattgtgggtcccccctttgtcaaggcgtcgagtctttctcccttaaggctagtcctgtcagtgaactctgtcgggcaactagtgacgccactgcatgcctccgacctcggccgcggagtgctgccccccaagtcatgcccctgaccacaagttgtgctgtctggcaaacattgtctgtgagaatgttccgctgtggctgccaagcctggtaacaggctgccccagtgtgcgtaattctcatccagacttcggtctggcaacttgctgttaagacatggcgtaaggggcgtgtgccaacgccctggaacgagtgtccactctaataccccgaggaatgctacgcaggtacccctggctcgccagggatctgagcgtaggctaattgtctaagggtattttcatttcccaccctcttcttcttgttcata

SEQ ID NO: 24324 - DNA, 501 bp, synthetic construct
  source 1..501: mol_type = other DNA
gcccggcatcctccccccagcctgacgtgccacaggctgtgcaaagaccccgcgaaagctgccaaaagtggcaattgtgggtcccccctttgtcaaggcgtcgagtctttctcccttaaggctagtcctgtcagtgaactctgtcgggcaactagtgacgccactgcatgcctccgacctcggccgcggagtgctgccccccaagtcatgcccctgaccacaagttgtgctgtctggcaaacattgtctgtgagaatgttccgctgtggctgccaagcctggtaacaggctgccccagtgtgcgtaattctcatccagacttcggtctggcaacttgctgttaagacatggcgtaaggggcgtgtgccaacgccctggaacgagtgtccactctaataccccgaggaatgctacgcaggtacccctggctcgccagggatctgagcgtaggctaattgtctaagggtattttcatttcccaccctcttcttcttgttcata

SEQ ID NO: 24325 - DNA, 562 bp, synthetic construct; identical to SEQ ID NO: 22615
  source 1..562: mol_type = other DNA

SEQ ID NO: 24326 - DNA, 512 bp, synthetic construct; identical to SEQ ID NO: 22616
  source 1..512: mol_type = other DNA

SEQ ID NO: 24327 - DNA, 716 bp, synthetic construct; identical to SEQ ID NO: 23973
  source 1..716: mol_type = other DNA

SEQ ID NO: 24328 - DNA, 666 bp, synthetic construct; identical to SEQ ID NO: 23974
  source 1..666: mol_type = other DNA

SEQ ID NO: 24329 - DNA, 616 bp, synthetic construct; identical to SEQ ID NO: 23975
  source 1..616: mol_type = other DNA

SEQ ID NO: 24330 - DNA, 566 bp, synthetic construct; identical to SEQ ID NO: 23976
  source 1..566: mol_type = other DNA

SEQ ID NO: 24331 - DNA, 516 bp, synthetic construct; identical to SEQ ID NO: 23977
  source 1..516: mol_type = other DNA

SEQ ID NO: 24332 - DNA, 659 bp, synthetic construct
  source 1..659: mol_type = other DNA
catcatctgtcctcacccccaattttcccttttcttcccctgcaaccattacgcttactcgcatgtgcattgagtggtgcatgtgttgaacaaacagctacactcacatgggggcgggttttcccgccctacggcctctcgcgaggcccaccccttccctccccttataactacagtgctttggtaggtaagcatcctgatcccccgcggaagctgctcacgtggcaactgtggggacccagacaggttatcaaaggcacccggtctttccgccttcaggagtatccctactagtgaattctagcggggctctgcttggtgccaacctcccccaaatgcgcgctgcgggagtgctcttccccaactcaccctagtatcctctcatgtgtgtgcttggtcagcatatctgagacgatgttccgctgtcccagaccagtccagtaatggacgggccagtgcgtgtagtcgtcttccggcttgtccggggcatgtttggtgaaccggtggggtaaggttggtgtgcccaacgcccgtactttggtgacacctcaagaccacccaggaatgccagggaggtaccccacctcacggtgggatctgaccctgggctaattgtctacggtggttcttcttgcttccacttctttcttctgttcacg

SEQ ID NO: 24333 - DNA, 609 bp, synthetic construct
  source 1..609: mol_type = other DNA
acgcttactcgcatgtgcattgagtggtgcatgtgttgaacaaacagctacactcacatgggggcgggttttcccgccctacggcctctcgcgaggcccaccccttccctccccttataactacagtgctttggtaggtaagcatcctgatcccccgcggaagctgctcacgtggcaactgtggggacccagacaggttatcaaaggcacccggtctttccgccttcaggagtatccctactagtgaattctagcggggctctgcttggtgccaacctcccccaaatgcgcgctgcgggagtgctcttccccaactcaccctagtatcctctcatgtgtgtgcttggtcagcatatctgagacgatgttccgctgtcccagaccagtccagtaatggacgggccagtgcgtgtagtcgtcttccggcttgtccggggcatgtttggtgaaccggtggggtaaggttggtgtgcccaacgcccgtactttggtgacacctcaagaccacccaggaatgccagggaggtaccccacctcacggtgggatctgaccctgggctaattgtctacggtggttcttcttgcttccacttctttcttctgttcacg

SEQ ID NO: 24334 - DNA, 559 bp, synthetic construct
  source 1..559: mol_type = other DNA
cactcacatgggggcgggttttcccgccctacggcctctcgcgaggcccaccccttccctccccttataactacagtgctttggtaggtaagcatcctgatcccccgcggaagctgctcacgtggcaactgtggggacccagacaggttatcaaaggcacccggtctttccgccttcaggagtatccctactagtgaattctagcggggctctgcttggtgccaacctcccccaaatgcgcgctgcgggagtgctcttccccaactcaccctagtatcctctcatgtgtgtgcttggtcagcatatctgagacgatgttccgctgtcccagaccagtccagtaatggacgggccagtgcgtgtagtcgtcttccggcttgtccggggcatgtttggtgaaccggtggggtaaggttggtgtgcccaacgcccgtactttggtgacacctcaagaccacccaggaatgccagggaggtaccccacctcacggtgggatctgaccctgggctaattgtctacggtggttcttcttgcttccacttctttcttctgttcacg

SEQ ID NO: 24335 - DNA, 509 bp, synthetic construct
  source 1..509: mol_type = other DNA
ccccttccctccccttataactacagtgctttggtaggtaagcatcctgatcccccgcggaagctgctcacgtggcaactgtggggacccagacaggttatcaaaggcacccggtctttccgccttcaggagtatccctactagtgaattctagcggggctctgcttggtgccaacctcccccaaatgcgcgctgcgggagtgctcttccccaactcaccctagtatcctctcatgtgtgtgcttggtcagcatatctgagacgatgttccgctgtcccagaccagtccagtaatggacgggccagtgcgtgtagtcgtcttccggcttgtccggggcatgtttggtgaaccggtggggtaaggttggtgtgcccaacgcccgtactttggtgacacctcaagaccacccaggaatgccagggaggtaccccacctcacggtgggatctgaccctgggctaattgtctacggtggttcttcttgcttccacttctttcttctgttcacg

SEQ ID NO: 24336 - DNA, 600 bp, synthetic construct
  source 1..600: mol_type = other DNA
catgtgcattgagtggtgcacgtgcttgaacaaacagctacactcacatgggggcgggttttcccgccctgcggcctctcgcgaggcccacccctccccttcctcccataactacagtgctttggtaggtaagcatcctgatcccccgcggaagctgctcacgtggcaactgtggggacccagacaggttatcaaaggcacccggtctttccgccttcaggagtatccctgctagtgaattctagtagggctctgcttggtgccaacctcccccaaatgcgcgctgcgggagtgctcttccccaactcaccctagtatcctctcatgtgtgtgcttggtcagcatatctgagacgatgttccgctgtcccagaccagtccagtaatggacgggccagtgtgcgtagtcgtcttccggcttgtccggcgcatgtttggtgaaccggtggggtaaggttggtgtgcccaacgcccgtactttggtgatacctcaagaccacccaggaatgccagggaggtaccccgcttcacagcgggatctgaccctgggctaattgtctacggtggttcttcttgcttccacttctttctactgttcatg

SEQ ID NO: 24337 - DNA, 550 bp, synthetic construct
  source 1..550: mol_type = other DNA
ggggcgggttttcccgccctgcggcctctcgcgaggcccacccctccccttcctcccataactacagtgctttggtaggtaagcatcctgatcccccgcggaagctgctcacgtggcaactgtggggacccagacaggttatcaaaggcacccggtctttccgccttcaggagtatccctgctagtgaattctagtagggctctgcttggtgccaacctcccccaaatgcgcgctgcgggagtgctcttccccaactcaccctagtatcctctcatgtgtgtgcttggtcagcatatctgagacgatgttccgctgtcccagaccagtccagtaatggacgggccagtgtgcgtagtcgtcttccggcttgtccggcgcatgtttggtgaaccggtggggtaaggttggtgtgcccaacgcccgtactttggtgatacctcaagaccacccaggaatgccagggaggtaccccgcttcacagcgggatctgaccctgggctaattgtctacggtggttcttcttgcttccacttctttctactgttcatg

SEQ ID NO: 24338 - DNA, 500 bp, synthetic construct
  source 1..500: mol_type = other DNA
tcctcccataactacagtgctttggtaggtaagcatcctgatcccccgcggaagctgctcacgtggcaactgtggggacccagacaggttatcaaaggcacccggtctttccgccttcaggagtatccctgctagtgaattctagtagggctctgcttggtgccaacctcccccaaatgcgcgctgcgggagtgctcttccccaactcaccctagtatcctctcatgtgtgtgcttggtcagcatatctgagacgatgttccgctgtcccagaccagtccagtaatggacgggccagtgtgcgtagtcgtcttccggcttgtccggcgcatgtttggtgaaccggtggggtaaggttggtgtgcccaacgcccgtactttggtgatacctcaagaccacccaggaatgccagggaggtaccccgcttcacagcgggatctgaccctgggctaattgtctacggtggttcttcttgcttccacttctttctactgttcatg

SEQ ID NO: 24339 - DNA, 680 bp, synthetic construct
  source 1..680: mol_type = other DNA
catctgtcctcattacccgtattccttcccttcccccgcaaccaccacgcttactcgcgcacgtgttgagtggcacgtgcgttgtccaaacagctacacccacacccttcggggcgggtttgtcccgccctcgggttcctcgcggaacccccccctccctctctctctttctatccgccctcacttcccataactacagtgctttggtaggtgagcaccctgaccccccgcggaagctgctaacgtggcaactgtggggatccaggcaggttatcaaaggcacccggtctttccgccttcaggagtatctctgccggtgaattccggtagggctctgcttggtgccaacctcccccaaatgcgcgctgcgggagtgctcttccccaactcatcttagtaacctctcatgtgtgtgcttggtcagcatatctgaggcgacgttccgctgtcccagaccagtccagcaatggacgggccagtgtgcgtagtcgctttccggttttccggcgcatgtttggcgaaacgctgaggtaaggttggtgtgcccaacgcccgtaatttggtgatacctcaagaccacccaggaatgccagggaggtaccccacttcggtgggatctgaccctgggctaattgtctacggtggttcttcttgcttccacttctcttttttctggcatg

SEQ ID NO: 24340 - DNA, 630 bp, synthetic construct
  source 1..630: mol_type = other DNA
ttactcgcgcacgtgttgagtggcacgtgcgttgtccaaacagctacacccacacccttcggggcgggtttgtcccgccctcgggttcctcgcggaacccccccctccctctctctctttctatccgccctcacttcccataactacagtgctttggtaggtgagcaccctgaccccccgcggaagctgctaacgtggcaactgtggggatccaggcaggttatcaaaggcacccggtctttccgccttcaggagtatctctgccggtgaattccggtagggctctgcttggtgccaacctcccccaaatgcgcgctgcgggagtgctcttccccaactcatcttagtaacctctcatgtgtgtgcttggtcagcatatctgaggcgacgttccgctgtcccagaccagtccagcaatggacgggccagtgtgcgtagtcgctttccggttttccggcgcatgtttggcgaaacgctgaggtaaggttggtgtgcccaacgcccgtaatttggtgatacctcaagaccacccaggaatgccagggaggtaccccacttcggtgggatctgaccctgggctaattgtctacggtggttcttcttgcttccacttctcttttttctggcatg

SEQ ID NO: 24341 - DNA, 580 bp, synthetic construct
  source 1..580: mol_type = other DNA
cacacccttcggggcgggtttgtcccgccctcgggttcctcgcggaacccccccctccctctctctctttctatccgccctcacttcccataactacagtgctttggtaggtgagcaccctgaccccccgcggaagctgctaacgtggcaactgtggggatccaggcaggttatcaaaggcacccggtctttccgccttcaggagtatctctgccggtgaattccggtagggctctgcttggtgccaacctcccccaaatgcgcgctgcgggagtgctcttccccaactcatcttagtaacctctcatgtgtgtgcttggtcagcatatctgaggcgacgttccgctgtcccagaccagtccagcaatggacgggccagtgtgcgtagtcgctttccggttttccggcgcatgtttggcgaaacgctgaggtaaggttggtgtgcccaacgcccgtaatttggtgatacctcaagaccacccaggaatgccagggaggtaccccacttcggtgggatctgaccctgggctaattgtctacggtggttcttcttgcttccacttctcttttttctggcatg

SEQ ID NO: 24342 - DNA, 530 bp, synthetic construct
  source 1..530: mol_type = other DNA
ccccctccctctctctctttctatccgccctcacttcccataactacagtgctttggtaggtgagcaccctgaccccccgcggaagctgctaacgtggcaactgtggggatccaggcaggttatcaaaggcacccggtctttccgccttcaggagtatctctgccggtgaattccggtagggctctgcttggtgccaacctcccccaaatgcgcgctgcgggagtgctcttccccaactcatcttagtaacctctcatgtgtgtgcttggtcagcatatctgaggcgacgttccgctgtcccagaccagtccagcaatggacgggccagtgtgcgtagtcgctttccggttttccggcgcatgtttggcgaaacgctgaggtaaggttggtgtgcccaacgcccgtaatttggtgatacctcaagaccacccaggaatgccagggaggtaccccacttcggtgggatctgaccctgggctaattgtctacggtggttcttcttgcttccacttctcttttttctggcatg

SEQ ID NO: 24343 - DNA, 702 bp, synthetic construct
  source 1..702: mol_type = other DNA
cctacccgcgacaagaatgccgtcatctgtccttatcacccatattctttcccttcccccgcaaccatcacgcttactcgcgcacgtgttgagtggcacgtgcgttgtccaaacagttacactcacacccttggggcgggtttgtcccgccctcgggttcctcgcggaaccctccctcttctctctccctttctatccgccttcactttccataactacagtgctttggtaggtaagcatcctgaccccccgcggaagctgccaacgtggcaactgtggggatccaggcaggttatcaaaggcacccggtctttccgccttcaggagtatccctgccggtgaattccgacagggctctgcttggtgccaacctcccccaaatgcgcgctgcgggagtgctcttccccaactcatcttagtaacctctcatgtgtgtgcttggtcagcatatctgaggcgacgttccgctgtcccagaccagtccagcaatggacgggccagtgtgcgtagtcgctttccggtttcccggcgcatgtttggcgaaacgctgaggtaaggttggtgtgcccaatgcccgtaatttggtgacacctcaagaccacccaggaatgccagggaggtaccccacttcggtgggatctgaccctgggctaattgtctacggtggttcttcttgcttccacttctcttttttctggcatg

SEQ ID NO: 24344 - DNA, 652 bp, synthetic construct
  source 1..652: mol_type = other DNA
cccttcccccgcaaccatcacgcttactcgcgcacgtgttgagtggcacgtgcgttgtccaaacagttacactcacacccttggggcgggtttgtcccgccctcgggttcctcgcggaaccctccctcttctctctccctttctatccgccttcactttccataactacagtgctttggtaggtaagcatcctgaccccccgcggaagctgccaacgtggcaactgtggggatccaggcaggttatcaaaggcacccggtctttccgccttcaggagtatccctgccggtgaattccgacagggctctgcttggtgccaacctcccccaaatgcgcgctgcgggagtgctcttccccaactcatcttagtaacctctcatgtgtgtgcttggtcagcatatctgaggcgacgttccgctgtcccagaccagtccagcaatggacgggccagtgtgcgtagtcgctttccggtttcccggcgcatgtttggcgaaacgctgaggtaaggttggtgtgcccaatgcccgtaatttggtgacacctcaagaccacccaggaatgccagggaggtaccccacttcggtgggatctgaccctgggctaattgtctacggtggttcttcttgcttccacttctcttttttctggcatg

SEQ ID NO: 24345 - DNA, 602 bp, synthetic construct
  source 1..602: mol_type = other DNA
tgcgttgtccaaacagttacactcacacccttggggcgggtttgtcccgccctcgggttcctcgcggaaccctccctcttctctctccctttctatccgccttcactttccataactacagtgctttggtaggtaagcatcctgaccccccgcggaagctgccaacgtggcaactgtggggatccaggcaggttatcaaaggcacccggtctttccgccttcaggagtatccctgccggtgaattccgacagggctctgcttggtgccaacctcccccaaatgcgcgctgcgggagtgctcttccccaactcatcttagtaacctctcatgtgtgtgcttggtcagcatatctgaggcgacgttccgctgtcccagaccagtccagcaatggacgggccagtgtgcgtagtcgctttccggtttcccggcgcatgtttggcgaaacgctgaggtaaggttggtgtgcccaatgcccgtaatttggtgacacctcaagaccacccaggaatgccagggaggtaccccacttcggtgggatctgaccctgggctaattgtctacggtggttcttcttgcttccacttctcttttttctggcatg

SEQ ID NO: 24346 - DNA, 552 bp, synthetic construct
  source 1..552: mol_type = other DNA
cctcgggttcctcgcggaaccctccctcttctctctccctttctatccgccttcactttccataactacagtgctttggtaggtaagcatcctgaccccccgcggaagctgccaacgtggcaactgtggggatccaggcaggttatcaaaggcacccggtctttccgccttcaggagtatccctgccggtgaattccgacagggctctgcttggtgccaacctcccccaaatgcgcgctgcgggagtgctcttccccaactcatcttagtaacctctcatgtgtgtgcttggtcagcatatctgaggcgacgttccgctgtcccagaccagtccagcaatggacgggccagtgtgcgtagtcgctttccggtttcccggcgcatgtttggcgaaacgctgaggtaaggttggtgtgcccaatgcccgtaatttggtgacacctcaagaccacccaggaatgccagggaggtaccccacttcggtgggatctgaccctgggctaattgtctacggtggttcttcttgcttccacttctcttttttctggcatg

SEQ ID NO: 24347 - DNA, 502 bp, synthetic construct
  source 1..502: mol_type = other DNA
cttcactttccataactacagtgctttggtaggtaagcatcctgaccccccgcggaagctgccaacgtggcaactgtggggatccaggcaggttatcaaaggcacccggtctttccgccttcaggagtatccctgccggtgaattccgacagggctctgcttggtgccaacctcccccaaatgcgcgctgcgggagtgctcttccccaactcatcttagtaacctctcatgtgtgtgcttggtcagcatatctgaggcgacgttccgctgtcccagaccagtccagcaatggacgggccagtgtgcgtagtcgctttccggtttcccggcgcatgtttggcgaaacgctgaggtaaggttggtgtgcccaatgcccgtaatttggtgacacctcaagaccacccaggaatgccagggaggtaccccacttcggtgggatctgaccctgggctaattgtctacggtggttcttcttgcttccacttctcttttttctggcatg

SEQ ID NO: 24348 - DNA, 603 bp, synthetic construct
  source 1..603: mol_type = other DNA
catgtgcattgagtggtgcacgtgcttgaacaaacagctacactcacatgggggcgggttttcccgccctgcggcctctcgcgaggcccacccctccccttcctcccataactacagtgctttggtaggtaagcatcctgatcccccgcggaagctgctcacgtggcaactgtggggacccagacaggttatcaaaggcacccggtctttccgccttcaggagtatccctgctagtgaattctagtagggctctgcttggtgccaacctcccccaaatgcgcgctgcgggagtgctcttccccaactcaccctagtatcctctcatgtgtgtgcttggtcagcatatctgagacgatgttccgctgtcccagaccagtccagtaatggacgggccagtgtgcgtagtcgtcttccggcttgtccggcgcatgtttggtgaaccggtggggtaaggttggtgtgcccaacgcccgtactttggtgatacctcaagaccacccaggaatgccagggaggtaccccgcttcacagcgggatctgaccctgggctaattgtctacggtggttcttcttgcttccacttctttctactgttcgccacc

SEQ ID NO: 24349 - DNA, 553 bp, synthetic construct
  source 1..553: mol_type = other DNA
ggggcgggttttcccgccctgcggcctctcgcgaggcccacccctccccttcctcccataactacagtgctttggtaggtaagcatcctgatcccccgcggaagctgctcacgtggcaactgtggggacccagacaggttatcaaaggcacccggtctttccgccttcaggagtatccctgctagtgaattctagtagggctctgcttggtgccaacctcccccaaatgcgcgctgcgggagtgctcttccccaactcaccctagtatcctctcatgtgtgtgcttggtcagcatatctgagacgatgttccgctgtcccagaccagtccagtaatggacgggccagtgtgcgtagtcgtcttccggcttgtccggcgcatgtttggtgaaccggtggggtaaggttggtgtgcccaacgcccgtactttggtgatacctcaagaccacccaggaatgccagggaggtaccccgcttcacagcgggatctgaccctgggctaattgtctacggtggttcttcttgcttccacttctttctactgttcgccacc

SEQ ID NO: 24350 - DNA, 503 bp, synthetic construct
  source 1..503: mol_type = other DNA
tcctcccataactacagtgctttggtaggtaagcatcctgatcccccgcggaagctgctcacgtggcaactgtggggacccagacaggttatcaaaggcacccggtctttccgccttcaggagtatccctgctagtgaattctagtagggctctgcttggtgccaacctcccccaaatgcgcgctgcgggagtgctcttccccaactcaccctagtatcctctcatgtgtgtgcttggtcagcatatctgagacgatgttccgctgtcccagaccagtccagtaatggacgggccagtgtgcgtagtcgtcttccggcttgtccggcgcatgtttggtgaaccggtggggtaaggttggtgtgcccaacgcccgtactttggtgatacctcaagaccacccaggaatgccagggaggtaccccgcttcacagcgggatctgaccctgggctaattgtctacggtggttcttcttgcttccacttctttctactgttcgccacc

SEQ ID NO: 24351 - DNA, 611 bp, synthetic construct
  source 1..611: mol_type = other DNA
cttcccttcactccttcgggactgttggggaggaacacaacagggctcccctgttttcccattccttcccccttttcccaaccccaaccgccgtatctggtggcggcaagacacacgggtctttccctctaaagcacaattgtgtgtgtgtcccaggtcctcctgcgtacggtgcgggagtgctcccacccaactgttgtaagcctgtccaacgcgtcgtcctggcaagactatgacgtcgcatgttccgctgcggatgccgaccgggtaaccggttccccagtgtgtgtagtgcgatcttccaggtcctcctggttggcgttgtccagaaactgcttcaggtaagtggggtgtgcccaatccctacaaaggttgattctttcaccaccttaggaatgctccggaggtaccccagcaacagctgggatctgaccggaggctaattgtctacgggtggtgtttcctttttcttttcacacaactctactgctgacaactcactgactatccacttgctctcttgtgcctttctgctctggttcaagttccttgattgtttttgactgcttttcactgcttttcttctcacaatccttgctcagttcaaagtc

SEQ ID NO: 24352 - DNA, 561 bp, synthetic construct
  source 1..561: mol_type = other DNA
ctgttttcccattccttcccccttttcccaaccccaaccgccgtatctggtggcggcaagacacacgggtctttccctctaaagcacaattgtgtgtgtgtcccaggtcctcctgcgtacggtgcgggagtgctcccacccaactgttgtaagcctgtccaacgcgtcgtcctggcaagactatgacgtcgcatgttccgctgcggatgccgaccgggtaaccggttccccagtgtgtgtagtgcgatcttccaggtcctcctggttggcgttgtccagaaactgcttcaggtaagtggggtgtgcccaatccctacaaaggttgattctttcaccaccttaggaatgctccggaggtaccccagcaacagctgggatctgaccggaggctaattgtctacgggtggtgtttcctttttcttttcacacaactctactgctgacaactcactgactatccacttgctctcttgtgcctttctgctctggttcaagttccttgattgtttttgactgcttttcactgcttttcttctcacaatccttgctcagttcaaagtc

SEQ ID NO: 24353 - DNA, 511 bp, synthetic construct
  source 1..511: mol_type = other DNA
tggcggcaagacacacgggtctttccctctaaagcacaattgtgtgtgtgtcccaggtcctcctgcgtacggtgcgggagtgctcccacccaactgttgtaagcctgtccaacgcgtcgtcctggcaagactatgacgtcgcatgttccgctgcggatgccgaccgggtaaccggttccccagtgtgtgtagtgcgatcttccaggtcctcctggttggcgttgtccagaaactgcttcaggtaagtggggtgtgcccaatccctacaaaggttgattctttcaccaccttaggaatgctccggaggtaccccagcaacagctgggatctgaccggaggctaattgtctacgggtggtgtttcctttttcttttcacacaactctactgctgacaactcactgactatccacttgctctcttgtgcctttctgctctggttcaagttccttgattgtttttgactgcttttcactgcttttcttctcacaatccttgctcagttcaaagtc

SEQ ID NO: 24354 - DNA, 575 bp, synthetic construct
  source 1..575: mol_type = other DNA
tttgagcacacccgcccactagggccccccatccaggggggcaacgggcaagcacttctgtttccccggtatgatctgataggctgtaaccacggctgaaacagagattatcgttatccgcttcactacttcgagaagcctagtaatgatgggtgaaattgaatccgttgatccggtgtctcccccacaccagaaactcatgatgagggttgccatcccggctacggcgacgtagcgggcatccctgcgctggcatgaggcctcttaggaggacggatgatatggatcttgtcgtgaagagcctattgagctagtgtcgactcctccgcccccgtgaatgcggctaatcctaaccccggagcaggtgggtccaatccagggcctggcctgtcgtaatgcgtaagtctgggacggaaccgactactttcgggaaggcgtgtttccatttgttcattatttgtgtgtttatggtgacaactctgggtaaacgttctattgcgtttattgagagattcccaacaattgaacaaacgagaactacctgttttattaaatttacacagagaagaattaca

SEQ ID NO: 24355 - DNA, 525 bp, synthetic construct
  source 1..525: mol_type = other DNA
agcacttctgtttccccggtatgatctgataggctgtaaccacggctgaaacagagattatcgttatccgcttcactacttcgagaagcctagtaatgatgggtgaaattgaatccgttgatccggtgtctcccccacaccagaaactcatgatgagggttgccatcccggctacggcgacgtagcgggcatccctgcgctggcatgaggcctcttaggaggacggatgatatggatcttgtcgtgaagagcctattgagctagtgtcgactcctccgcccccgtgaatgcggctaatcctaaccccggagcaggtgggtccaatccagggcctggcctgtcgtaatgcgtaagtctgggacggaaccgactactttcgggaaggcgtgtttccatttgttcattatttgtgtgtttatggtgacaactctgggtaaacgttctattgcgtttattgagagattcccaacaattgaacaaacgagaactacctgttttattaaatttacacagagaagaattaca

SEQ ID NO: 24356 - DNA, 580 bp, synthetic construct
  source 1..580: mol_type = other DNA
aagacattagaagaatagcataccgcccactagggccctgcagccagcagggtaacgggcaagcacttctgtctccccggtagaacggtataggctgtacccacggccgaaaactgaactatcgttacccgactccgtacttcgcaaagcttagtaggaaactggaaagttcgagttattgacccggagtgttccccccactccagaaacgcgtgatgagggttgccaccccgaccatggcgacatggtgggcatccctgcgctggcacgcggcctctaagaggataactcgctcctactggtaaccgaagagccccgtgagctacggtttattcctccgcctccctgaatgcggctaatcctaacccatgagcagttgccatagatccatatggtggactgtcgtaacgcgtaagttgtgggcggaaccgactactttgggatggcgtgtttccttgttttctccatttgttgttgtatggtgacaagttatagatctcgatctatagcgtttcttgagagatttccaaacatttattcaagtcgtacaattcttgtgtttaagcagtacagtgtaacc

SEQ ID NO: 24357 - DNA, 530 bp, synthetic construct
  source 1..530: mol_type = other DNA
ggtaacgggcaagcacttctgtctccccggtagaacggtataggctgtacccacggccgaaaactgaactatcgttacccgactccgtacttcgcaaagcttagtaggaaactggaaagttcgagttattgacccggagtgttccccccactccagaaacgcgtgatgagggttgccaccccgaccatggcgacatggtgggcatccctgcgctggcacgcggcctctaagaggataactcgctcctactggtaaccgaagagccccgtgagctacggtttattcctccgcctccctgaatgcggctaatcctaacccatgagcagttgccatagatccatatggtggactgtcgtaacgcgtaagttgtgggcggaaccgactactttgggatggcgtgtttccttgttttctccatttgttgttgtatggtgacaagttatagatctcgatctatagcgtttcttgagagatttccaaacatttattcaagtcgtacaattcttgtgtttaagcagtacagtgtaacc

SEQ ID NO: 24358 - DNA, 615 bp, synthetic construct
  source 1..615: mol_type = other DNA
cttcccttcactccctcgggactgttggggaggaacacaacagggctcccctgtatttcctcttcccattccccctttcctaaccccaaccgccgtatctggtggcggtaagacacacgggtctttccctctaaagcacaattgtgtgtgtgtcccaggtcctcctgcgttcggtgcgggagtgctcccacccaactgttgtaagcctgtccaacgtgtcgtcctggcaagactatgacgtcgcatgttccgctgtggatgccgaccgggtaaccggttccccagtgtgtgtagtgcgatcttccaggttctcctggttggcgttgtccagaaactgcttcgggtaagtggggtgtgcccaatccctacaagggttgattctttcaccaccttaggaatgctccggaggtaccccagcaacagctgggatctgaccggaggctaattgtctacgggtggtgtttccattttctttttcacacaacttcattgctgacaactcactgactaatcacttgctctcttgtgcctttctgctctggttcaagttccttgattgtttgtttgattgcttttcactgctttcttcccacaatccttgctcagttcaaagtc

SEQ ID NO: 24359 - DNA, 565 bp, synthetic construct
  source 1..565: mol_type = other DNA
ctgtatttcctcttcccattccccctttcctaaccccaaccgccgtatctggtggcggtaagacacacgggtctttccctctaaagcacaattgtgtgtgtgtcccaggtcctcctgcgttcggtgcgggagtgctcccacccaactgttgtaagcctgtccaacgtgtcgtcctggcaagactatgacgtcgcatgttccgctgtggatgccgaccgggtaaccggttccccagtgtgtgtagtgcgatcttccaggttctcctggttggcgttgtccagaaactgcttcgggtaagtggggtgtgcccaatccctacaagggttgattctttcaccaccttaggaatgctccggaggtaccccagcaacagctgggatctgaccggaggctaattgtctacgggtggtgtttccattttctttttcacacaacttcattgctgacaactcactgactaatcacttgctctcttgtgcctttctgctctggttcaagttccttgattgtttgtttgattgcttttcactgctttcttcccacaatccttgctcagttcaaagtc

SEQ ID NO: 24360 - DNA, 515 bp, synthetic construct
  source 1..515: mol_type = other DNA
ggtggcggtaagacacacgggtctttccctctaaagcacaattgtgtgtgtgtcccaggtcctcctgcgttcggtgcgggagtgctcccacccaactgttgtaagcctgtccaacgtgtcgtcctggcaagactatgacgtcgcatgttccgctgtggatgccgaccgggtaaccggttccccagtgtgtgtagtgcgatcttccaggttctcctggttggcgttgtccagaaactgcttcgggtaagtggggtgtgcccaatccctacaagggttgattctttcaccaccttaggaatgctccggaggtaccccagcaacagctgggatctgaccggaggctaattgtctacgggtggtgtttccattttctttttcacacaacttcattgctgacaactcactgactaatcacttgctctcttgtgcctttctgctctggttcaagttccttgattgtttgtttgattgcttttcactgctttcttcccacaatccttgctcagttcaaagtc

SEQ ID NO: 24361 - DNA, 737 bp, synthetic construct
  source 1..737: mol_type = other DNA
agtctggattcccaaggcccactcggttcaacttcggtttccggacaaatacaaagaacctcagtcctcttggtactttctcgcctgagtctacaaagcgagaaacctgcccctctaacgccagacgagcggcataaaactcgaacttctggcacgttccaccaccccttctcctatcccaacccccattgcgctctcaaggtcgcgcttttccgagactagctcggattcaaaaagttcctggcaccctttaccccttcaggcccttaaggtaggaactgaccttgtgctgtgatctcggtgcggaagtgctactgcgtagtgattgtaagatccttttgtggttctgccctggcaaggctacagagtgctgtgatccgctgcggatgccatcctggtaacaggacccccagtgtgcgcaacagtatgttcacggtcttccgtgttcaccacattcggaacactgctttcgtgaaacagtgtgtgtccaatccctgtgatcagtatcaaccacaccacctaggaatgctaggaaggtaccccggttcgccgggatctgatcctaggctaattgtctacggtggtgctcctttttattttccacttcaactcactggttacaactgcttgatttctgtgtttgctgcttttctctgctctcactgccattctcaagtgttcacactgtccaagctcctttggttgttcgcttccacttgccactgtcaactcttgtc

SEQ ID NO: 24362 - DNA, 687 bp, synthetic construct
  source 1..687: mol_type = other DNA
acaaagaacctcagtcctcttggtactttctcgcctgagtctacaaagcgagaaacctgcccctctaacgccagacgagcggcataaaactcgaacttctggcacgttccaccaccccttctcctatcccaacccccattgcgctctcaaggtcgcgcttttccgagactagctcggattcaaaaagttcctggcaccctttaccccttcaggcccttaaggtaggaactgaccttgtgctgtgatctcggtgcggaagtgctactgcgtagtgattgtaagatccttttgtggttctgccctggcaaggctacagagtgctgtgatccgctgcggatgccatcctggtaacaggacccccagtgtgcgcaacagtatgttcacggtcttccgtgttcaccacattcggaacactgctttcgtgaaacagtgtgtgtccaatccctgtgatcagtatcaaccacaccacctaggaatgctaggaaggtaccccggttcgccgggatctgatcctaggctaattgtctacggtggtgctcctttttattttccacttcaactcactggttacaactgcttgatttctgtgtttgctgcttttctctgctctcactgccattctcaagtgttcacactgtccaagctcctttggttgttcgcttccacttgccactgtcaactcttgtc

SEQ ID NO: 24363 - DNA, 637 bp, synthetic construct
  source 1..637: mol_type = other DNA
agaaacctgcccctctaacgccagacgagcggcataaaactcgaacttctggcacgttccaccaccccttctcctatcccaacccccattgcgctctcaaggtcgcgcttttccgagactagctcggattcaaaaagttcctggcaccctttaccccttcaggcccttaaggtaggaactgaccttgtgctgtgatctcggtgcggaagtgctactgcgtagtgattgtaagatccttttgtggttctgccctggcaaggctacagagtgctgtgatccgctgcggatgccatcctggtaacaggacccccagtgtgcgcaacagtatgttcacggtcttccgtgttcaccacattcggaacactgctttcgtgaaacagtgtgtgtccaatccctgtgatcagtatcaaccacaccacctaggaatgctaggaaggtaccccggttcgccgggatctgatcctaggctaattgtctacggtggtgctcctttttattttccacttcaactcactggttacaactgcttgatttctgtgtttgctgcttttctctgctctcactgccattctcaagtgttcacactgtccaagctcctttggttgttcgcttccacttgccactgtcaactcttgtc

SEQ ID NO: 24364 - DNA, 587 bp, synthetic construct
  source 1..587: mol_type = other DNA
ggcacgttccaccaccccttctcctatcccaacccccattgcgctctcaaggtcgcgcttttccgagactagctcggattcaaaaagttcctggcaccctttaccccttcaggcccttaaggtaggaactgaccttgtgctgtgatctcggtgcggaagtgctactgcgtagtgattgtaagatccttttgtggttctgccctggcaaggctacagagtgctgtgatccgctgcggatgccatcctggtaacaggacccccagtgtgcgcaacagtatgttcacggtcttccgtgttcaccacattcggaacactgctttcgtgaaacagtgtgtgtccaatccctgtgatcagtatcaaccacaccacctaggaatgctaggaaggtaccccggttcgccgggatctgatcctaggctaattgtctacggtggtgctcctttttattttccacttcaactcactggttacaactgcttgatttctgtgtttgctgcttttctctgctctcactgccattctcaagtgttcacactgtccaagctcctttggttgttcgcttccacttgccactgtcaactcttgtc

SEQ ID NO: 24365 - DNA, 537 bp, synthetic construct
  source 1..537: mol_type = other DNA
ggtcgcgcttttccgagactagctcggattcaaaaagttcctggcaccctttaccccttcaggcccttaaggtaggaactgaccttgtgctgtgatctcggtgcggaagtgctactgcgtagtgattgtaagatccttttgtggttctgccctggcaaggctacagagtgctgtgatccgctgcggatgccatcctggtaacaggacccccagtgtgcgcaacagtatgttcacggtcttccgtgttcaccacattcggaacactgctttcgtgaaacagtgtgtgtccaatccctgtgatcagtatcaaccacaccacctaggaatgctaggaaggtaccccggttcgccgggatctgatcctaggctaattgtctacggtggtgctcctttttattttccacttcaactcactggttacaactgcttgatttctgtgtttgctgcttttctctgctctcactgccattctcaagtgttcacactgtccaagctcctttggttgttcgcttccacttgccactgtcaactcttgtc

SEQ ID NO: 24366 - DNA, 720 bp, synthetic construct; identical to SEQ ID NO: 23983
  source 1..720: mol_type = other DNA

SEQ ID NO: 24367 - DNA, 670 bp, synthetic construct; identical to SEQ ID NO: 23984
  source 1..670: mol_type = other DNA

SEQ ID NO: 24368 - DNA, 620 bp, synthetic construct; identical to SEQ ID NO: 23985
  source 1..620: mol_type = other DNA

SEQ ID NO: 24369 - DNA, 570 bp, synthetic construct; identical to SEQ ID NO: 23986
  source 1..570: mol_type = other DNA

SEQ ID NO: 24370 - DNA, 520 bp, synthetic construct; identical to SEQ ID NO: 23987
  source 1..520: mol_type = other DNA

SEQ ID NO: 24371 - DNA, 732 bp, synthetic construct
  source 1..732: mol_type = other DNA
cgataccgcactgtgctacttcggtaccactctgcgggaatgacaatatgcccggtgtatagtttgcctgtttctcgcaccgttaccgctcgttcgggaatgtgaaactggcacccctcctctcccctaccaccctttctccttcgcccccattcataatttacaacgccgcacacagcggcggccgccaagggctagcctggcggttataaaaggaacctgggtctttccctcttcaagccaaaaggtaggttccctgtgtccctgaatgctcggtgaggaatgctgcaccgtaacgctttgtgaagtgtttgcaagttctggcccggcaagcctacagagtgctgtgatccgctgcggacgccatcctggtaacaggacccccagtgtgcgcaacagtatgttcagacttcggtttgttcacttgctttcatggaccattgcgcgaaagtgcgtgcgccatatccctgtacttcaggtgtgcttctctggaccctaggaatgctgcgaaggtaccccgtttcggcgggatctgatcgcaggctaattgtctatgggttcagtttcctttttctttactccacaattgactgcttaactgactctggatcttgtgcttccactgctctttctgctctcaaaacggcttcacttaccaactctcacctttcgaccaacaccatttacacactaacttttttcgactcttctgactcctggcttggtgaagac

SEQ ID NO: 24372 - DNA, 682 bp, synthetic construct
  source 1..682: mol_type = other DNA
cccggtgtatagtttgcctgtttctcgcaccgttaccgctcgttcgggaatgtgaaactggcacccctcctctcccctaccaccctttctccttcgcccccattcataatttacaacgccgcacacagcggcggccgccaagggctagcctggcggttataaaaggaacctgggtctttccctcttcaagccaaaaggtaggttccctgtgtccctgaatgctcggtgaggaatgctgcaccgtaacgctttgtgaagtgtttgcaagttctggcccggcaagcctacagagtgctgtgatccgctgcggacgccatcctggtaacaggacccccagtgtgcgcaacagtatgttcagacttcggtttgttcacttgctttcatggaccattgcgcgaaagtgcgtgcgccatatccctgtacttcaggtgtgcttctctggaccctaggaatgctgcgaaggtaccccgtttcggcgggatctgatcgcaggctaattgtctatgggttcagtttcctttttctttactccacaattgactgcttaactgactctggatcttgtgcttccactgctctttctgctctcaaaacggcttcacttaccaactctcacctttcgaccaacaccatttacacactaacttttttcgactcttctgactcctggcttggtgaagac

SEQ ID NO: 24373 - DNA, 632 bp, synthetic construct
  source 1..632: mol_type = other DNA
tgtgaaactggcacccctcctctcccctaccaccctttctccttcgcccccattcataatttacaacgccgcacacagcggcggccgccaagggctagcctggcggttataaaaggaacctgggtctttccctcttcaagccaaaaggtaggttccctgtgtccctgaatgctcggtgaggaatgctgcaccgtaacgctttgtgaagtgtttgcaagttctggcccggcaagcctacagagtgctgtgatccgctgcggacgccatcctggtaacaggacccccagtgtgcgcaacagtatgttcagacttcggtttgttcacttgctttcatggaccattgcgcgaaagtgcgtgcgccatatccctgtacttcaggtgtgcttctctggaccctaggaatgctgcgaaggtaccccgtttcggcgggatctgatcgcaggctaattgtctatgggttcagtttcctttttctttactccacaattgactgcttaactgactctggatcttgtgcttccactgctctttctgctctcaaaacggcttcacttaccaactctcacctttcgaccaacaccatttacacactaacttttttcgactcttctgactcctggcttggtgaagac

SEQ ID NO: 24374 - DNA, 582 bp, synthetic construct
  source 1..582: mol_type = other DNA
cattcataatttacaacgccgcacacagcggcggccgccaagggctagcctggcggttataaaaggaacctgggtctttccctcttcaagccaaaaggtaggttccctgtgtccctgaatgctcggtgaggaatgctgcaccgtaacgctttgtgaagtgtttgcaagttctggcccggcaagcctacagagtgctgtgatccgctgcggacgccatcctggtaacaggacccccagtgtgcgcaacagtatgttcagacttcggtttgttcacttgctttcatggaccattgcgcgaaagtgcgtgcgccatatccctgtacttcaggtgtgcttctctggaccctaggaatgctgcgaaggtaccccgtttcggcgggatctgatcgcaggctaattgtctatgggttcagtttcctttttctttactccacaattgactgcttaactgactctggatcttgtgcttccactgctctttctgctctcaaaacggcttcacttaccaactctcacctttcgaccaacaccatttacacactaacttttttcgactcttctgactcctggcttggtgaagac

SEQ ID NO: 24375 - DNA, 532 bp, synthetic construct
  source 1..532: mol_type = other DNA
tggcggttataaaaggaacctgggtctttccctcttcaagccaaaaggtaggttccctgtgtccctgaatgctcggtgaggaatgctgcaccgtaacgctttgtgaagtgtttgcaagttctggcccggcaagcctacagagtgctgtgatccgctgcggacgccatcctggtaacaggacccccagtgtgcgcaacagtatgttcagacttcggtttgttcacttgctttcatggaccattgcgcgaaagtgcgtgcgccatatccctgtacttcaggtgtgcttctctggaccctaggaatgctgcgaaggtaccccgtttcggcgggatctgatcgcaggctaattgtctatgggttcagtttcctttttctttactccacaattgactgcttaactgactctggatcttgtgcttccactgctctttctgctctcaaaacggcttcacttaccaactctcacctttcgaccaacaccatttacacactaacttttttcgactcttctgactcctggcttggtgaagac

SEQ ID NO: 24376 - DNA, 950 bp, synthetic construct; identical to SEQ ID NO: 22593
  source 1..950: mol_type = other DNA

SEQ ID NO: 24377 - DNA, 900 bp, synthetic construct; identical to SEQ ID NO: 22594
  source 1..900: mol_type = other DNA

SEQ ID NO: 24378 - DNA, 850 bp, synthetic construct; identical to SEQ ID NO: 22595
  source 1..850: mol_type = other DNA

SEQ ID NO: 24379 - DNA, 800 bp, synthetic construct; identical to SEQ ID NO: 22596
  source 1..800: mol_type = other DNA

SEQ ID NO: 24380 - DNA, 750 bp, synthetic construct; identical to SEQ ID NO: 22597
  source 1..750: mol_type = other DNA

SEQ ID NO: 24381 - DNA, 700 bp, synthetic construct; identical to SEQ ID NO: 22598
  source 1..700: mol_type = other DNA

SEQ ID NO: 24382 - DNA, 650 bp, synthetic construct; identical to SEQ ID NO: 22599
  source 1..650: mol_type = other DNA

SEQ ID NO: 24383 - DNA, 600 bp, synthetic construct; identical to SEQ ID NO: 22600
  source 1..600: mol_type = other DNA

SEQ ID NO: 24384 - DNA, 550 bp, synthetic construct; identical to SEQ ID NO: 22601
  source 1..550: mol_type = other DNA

SEQ ID NO: 24385 - DNA, 500 bp, synthetic construct; identical to SEQ ID NO: 22602
  source 1..500: mol_type = other DNA

SEQ ID NO: 24386 - DNA, 679 bp, synthetic construct; identical to SEQ ID NO: 23005
  source 1..679: mol_type = other DNA

SEQ ID NO: 24387 - DNA, 629 bp, synthetic construct; identical to SEQ ID NO: 23006
  source 1..629: mol_type = other DNA

SEQ ID NO: 24388 - DNA, 579 bp, synthetic construct; identical to SEQ ID NO: 23007
  source 1..579: mol_type = other DNA

SEQ ID NO: 24389 - DNA, 529 bp, synthetic construct; identical to SEQ ID NO: 23008
  source 1..529: mol_type = other DNA

SEQ ID NO: 24390 - DNA, 705 bp, synthetic construct; identical to SEQ ID NO: 23943
  source 1..705: mol_type = other DNA

SEQ ID NO: 24391 - DNA, 655 bp, synthetic construct; identical to SEQ ID NO: 23944
  source 1..655: mol_type = other DNA

SEQ ID NO: 24392 - DNA, 605 bp, synthetic construct; identical to SEQ ID NO: 23945
  source 1..605: mol_type = other DNA

SEQ ID NO: 24393 - DNA, 555 bp, synthetic construct; identical to SEQ ID NO: 23946
  source 1..555: mol_type = other DNA

SEQ ID NO: 24394 - DNA, 505 bp, synthetic construct; identical to SEQ ID NO: 23947
  source 1..505: mol_type = other DNA

SEQ ID NO: 24395 - DNA, 746 bp, synthetic construct
  source 1..746: mol_type = other DNA
tttaaaacagcctgtgggttgtacccacccacagggcccactgggcgctagcactctgattccacgggatccttgtgcgcctgttttatatcccctccccaagttgtaacttagaagtattacactacaatgatcagtagcaggcgtggcgcaccagccatgtctcgatcaagcacttctgtttccccggaccgagtatcaatagactgctaacgcggttgaaggagaaaacgttcgttatccggctaactacttcgagaaacctagtagcaccatcgaagctgcggggcgtttcgctcagcacttcccccgtgtagatcaggtcgatgagtcactgcaatcctcacgggcgaccgtggcagtggctgcgttggcggcctgcctatggggcaacccataggacgcttcaaagtggacatggtgtgaagagtctattgagctagttagtagtcctccggcccctgaatgcggctaatcctaactgcggagcacataccttcaatccagaaggtagtgtgtcgtaacgggcaactctgcagcggaaccgactactttgggtgtccgtgtttccttttattctcttattggctgcttatggtgacaattgaagaattgttaccatatagctattggattggccatccagtgtctaacagagcaattgtgtacttatttgctggttttgttcctttgtcttacacgtctcttagcactttgtattacattataaaactgaactcggaaag

SEQ ID NO: 24396 - DNA, 742 bp, synthetic construct; identical to SEQ ID NO: 19822
  source 1..742: mol_type = other DNA

SEQ ID NO: 24397 - DNA, 922 bp, synthetic construct
  source 1..922: mol_type = other DNA
gcggccgcgaattcaaaagctagagtcgactctagggagtggggaggcacgatggccgctttggtcgaggcggatccggccattagccatattattcattggttatatagcataaatcaatattggctattggccattgcatacgttgtatccatatcataatatgtacatttatattggctcatgtccaacattaccgccatgttgacattgattattgactagttattaatagtaatcaattacggggtcattagttcatagcccatatatggagttccgcgttacataacttacggtaaatggcccgcctggctgaccgcccaacgacccccgcccattgacgtcaataatgacgtatgttcccatagtaacgccaatagggactttccattgacgtcaatgggtggagtatttacggtaaactgcccacttggcagtacatcaagtgtatcatatgccaagtacgccccctattgacgtcaatgacggtaaatggcccgcctggcattatgcccagtacatgaccttatgggactttcctacttggcagtacatctacgtattagtcatcgctattaccatggtgatgcggttttggcagtacatcaatgggcgtggatagcggtttgactcacggggatttccaagtctccaccccattgacgtcaatgggagtttgttttggcaccaaaatcaacgggactttccaaaatgtcgtaacaactccgccccattgacgcaaatgggcggtaggcgtgtacggtgggaggtctatataagcagagctcgtttagtgaaccgtcagatcgcctggagacgccatccacgctgttttgacctccatagaagacaccgggaccgatccagcctccgcggccccaagctagtcgactttaagcttctcgagaattcgtgcacc

SEQ ID NO: 24398 - DNA, 742 bp, synthetic construct; identical to SEQ ID NO: 19982
  source 1..742: mol_type = other DNA

SEQ ID NO: 24399 - DNA, 742 bp, synthetic construct; identical to SEQ ID NO: 19977
  source 1..742: mol_type = other DNA

SEQ ID NO: 24400 - DNA, 742 bp, synthetic construct; identical to SEQ ID NO: 19988
  source 1..742: mol_type = other DNA

SEQ ID NO: 24401 - DNA, 712 bp, synthetic construct; identical to SEQ ID NO: 19911
  source 1..712: mol_type = other DNA

SEQ ID NO: 24402 - DNA, 742 bp, synthetic construct; identical to SEQ ID NO: 20005
  source 1..742: mol_type = other DNA

SEQ ID NO: 24403 - DNA, 742 bp, synthetic construct; identical to SEQ ID NO: 19968
  source 1..742: mol_type = other DNA

SEQ ID NO: 24404 - DNA, 742 bp, synthetic construct; identical to SEQ ID NO: 19966
  source 1..742: mol_type = other DNA

SEQ ID NO: 24405 - DNA, 743 bp, synthetic construct; identical to SEQ ID NO: 19941
  source 1..743: mol_type = other DNA

SEQ ID NO: 24406 - DNA, 714 bp, synthetic construct; identical to SEQ ID NO: 22313
  source 1..714: mol_type = other DNA

SEQ ID NO: 24407 - DNA, 645 bp, synthetic construct; identical to SEQ ID NO: 19813
  source 1..645: mol_type = other DNA

SEQ ID NO: 24408 - DNA, 1000 bp, synthetic construct
  source 1..1000: mol_type = other DNA
cattatgctacagttcccgcccgggacaactgacaccccattaggctacaacatggccgaaaagggtgttgggtccccccggattgtgtctgttcatagtgtgtgtaacgtggtttaccatctccactaacattggactaagcatttcatctttcctccccgattgtgtactcacttggctaacgctgggtggtcgcggttgggtccttgatttactttttctcgtctaagcattccaactgtcctccccgattatgtgctcattcagttaactgctgggtggtcatgactaacatcgaggaatcttctgtccacgcttactttgagctccggtcgcttgacgcttgtagggcgatagggttatcttcctgacaacatctttattctacctccataggctctatctatggagacggagtgtggcacccgtcccttctttgggagcttcggtagtgacgccctttgtcactctcgccagccgaggcatgcctggtgccaggtagcaaagaaagcatatgcttaaggacttgactgatttagcgcaagagtttgtagtgatgtccatagtgtctgcggatcccccacacggcgacgtgtgccgcggaggccaaaagccacggtgttcacagcacccctatggatgcccacagaccccagtgggcactcttgttgccggactttcaggaaattaggtataggctcttctcaaactcctggcattggactaggtaagaatgccccggaggtaccccagtactccttcgggagtctgggatctgaccgggggccccacaaacatgctttacgtgtttcgtgcggtcaaaaattgtctaactagtcccaaccttgaacaagggattgttctttcctttttattactgagactggcctatggtgacaacagagattgactgcaaatacagttattttctggtgttcatcatttggattttctcactgctcttttacctttgtggtatttgttcactcaacaagcaag

SEQ ID NO: 24409 - DNA, 581 bp, synthetic construct; identical to SEQ ID NO: 19686
  source 1..581: mol_type = other DNA

SEQ ID NO: 24410 - DNA, 632 bp, synthetic construct
  source 1..632: mol_type = other DNA
ggtaccctatcgtcgcctgttttatttcccttcccccgtaacgttagaagaaagtacaattgacaaatagtaaatccaccaacccaggtgggttttcgtcaagcacttctgtttccccggacctagtaccaataagctgtatccacggctgaaggggaaaacgttcgttacccggctacctacttcgagaagcctagtaccatcattgaatgtctcaagtgttacgttcagcacaaccccagtgtagttcaggtcgatgagtcaccgagatccccacgggcgaccgtgtcggtggctgcgttggcggcctgcctgtgagttttgctcacaggacgcttgattcatgacatggtgcgaagagcctattgagctaggtagtagtcctccggcccctgaatgcggctaatcctaaccacggagccatgcgttgcaaaccagcgacgttgtggtcgtaacgagcaattctgtggcggaaccgactactttgggtgtccgtgtttcctgttttacttaccttggctgcttatggtgacaattatatagttgtcatcatatagctattggattggccatccggttatataaaatcacttattacttgctcaagcaattcttatctaatcacagataaa

SEQ ID NO: 24411 - DNA, 574 bp, synthetic construct
  source 1..574: mol_type = other DNA
caaatgacaaatagtaaatccaccaacccaggtgggttttcgtcaagcacttctgtttccccggacctagtaccaataagctgtacccacggctgaaggggaaaacgttcgttacccggctacctacttcgagaagcctagtaccatcattgaatgtctcaagtgttacgttcagcacaaccccagtgtagttcaggtcgatgagtcaccgaattccccacgggcgaccgtgtcggtggctgcgttggcggcctgcctgtgagtttcactcacaggacgcttgattcatgacatggtgcgaagagcctattgagctaggtagtagtcctccggcccctgaatgcggctaatcctaaccacggagccatgcgttgcaaaccagtaacgttatggtcgtaacgagcaattctgtggcggaaccgactactttgggtgtccgtgtttcctgttttatttaccttggctgcttatggtgacaattgtatagttgtcatcatatagctattggattggccatccggatacacaatcacttgctacttgtccaaacaactctcttttggatacaagcata

SEQ ID NO: 24412 - DNA, 742 bp, synthetic construct; identical to SEQ ID NO: 19252
  source 1..742: mol_type = other DNA

SEQ ID NO: 24413 - DNA, 743 bp, synthetic construct; identical to SEQ ID NO: 20446
  source 1..743: mol_type = other DNA

SEQ ID NO: 24414 - DNA, 688 bp, synthetic construct; identical to SEQ ID NO: 21121
  source 1..688: mol_type = other DNA

SEQ ID NO: 24415 - DNA, 744 bp, synthetic construct; identical to SEQ ID NO: 19262
  source 1..744: mol_type = other DNA

SEQ ID NO: 24416 - DNA, 732 bp, synthetic construct
  source 1..732: mol_type = other DNA
gtgggttgttcccacccacagggcccattgggcgccagcacactggtatcacggtacccttgtgcgcctgttttatctaccccctcccccaatgtaacgtagaagcacaaatcaagtggtcaatagatggcccagtatgccaactgggtttagaccaagcacttctgtcaacccggactgagtatcaataagctgctcacgcggctgaaggagaaaacgttcgttacccggccaactacttcgagaagcctagtaccaccatgaaggatgcgcagtgtttcgttcagcacaaccccagtgtagatcaggtcgatgagtcaccgcaatccccacgggcgaccgtggcggtggctgcgctggcggcctgcccatgaggttactcatgggacgcttcaattcagacatggtgcgaagagcctattgagctagttggtagtcctccggcccctgaatgcggctaatcccaactgcggagcaagcacccacaaaccagtgggctgtttgtcgtaacgggcaactctgcagcggaaccgactactttgggtgtccgtgtttccttttattcctacactggctgcatatggtgacaattgaaagattgttgccatatagctattggattggccacccggtgacaagcagagccattatctacttgtttgtcggctttgtaccgttgagtttcaaagttgtaagaaccctaatctttatcttaacactcaacacagcaaa

SEQ ID NO: 24417 - DNA, 720 bp, synthetic construct; identical to SEQ ID NO: 19487
  source 1..720: mol_type = other DNA

SEQ ID NO: 24418 - DNA, 743 bp, synthetic construct; identical to SEQ ID NO: 20408
  source 1..743: mol_type = other DNA

SEQ ID NO: 24419 - DNA, 742 bp, synthetic construct; identical to SEQ ID NO: 20438
  source 1..742: mol_type = other DNA

SEQ ID NO: 24420 - DNA, 654 bp, synthetic construct; identical to SEQ ID NO: 21478
  source 1..654: mol_type = other DNA

SEQ ID NO: 24421 - DNA, 618 bp, synthetic construct
  source 1..618: mol_type = other DNA
gatcaacagtaggtgttacataccagtcatacctcgatcaagcacttctgtttccccggactgagtatcaataggctgctcgcgcggctgaaagagaaaacgttcgttacccggccaactacttcgagaagcttagtaccaccatgaacgaggcagagcgtttcgctcggcacaaccccagtgtagatcaggctgatgagtcactgcaatccccatgggcgaccatggcagtggctgcgttggcggcctgcccatggagaaatccatgggacgctctaattttgacatggtgcgaagagcctattgagctagctggtagtcctccggcccctgaatgcggctaatccctaactgcggagcacacacccacaaaccagtgggcagtgtgtcgtaacgggcaactctgcagcggaaccgactactttgggtgtccgtgtttccttttatttttatgttggctgcttatggtgacaatcaaagagttgttaccatatagctattggattggccatccggtgtgcaacagagcaattgtttacctatttattggttttgtaccattgacactgaagtctgtggtcacccgtaattttatcttgaacctcaacgcagtcaaac

SEQ ID NO: 24422 - DNA, 737 bp, synthetic construct; identical to SEQ ID NO: 20496
  source 1..737: mol_type = other DNA

SEQ ID NO: 24423 - DNA, 716 bp, synthetic construct; identical to SEQ ID NO: 22185
  source 1..716: mol_type = other DNA

SEQ ID NO: 24424 - DNA, 744 bp, synthetic construct; identical to SEQ ID NO: 19001
  source 1..744: mol_type = other DNA

SEQ ID NO: 24425 - DNA, 705 bp, synthetic construct
  source 1..705: mol_type = other DNA
ctgggcgctagcacactggtatcacggtacctttgtgcgcctgttttatccaccctaaccccaagtcaacatagaagcataccgcaaaaggtcaataggtgacccagcactccagctgggttttgaccaagcacttctgttaccccggactgagtaccaataagctgctcgcgcggctgaaagggaaaacgttcgttacccggccaattacttcgaaaaacctagtacaaccatgaaagttgcgcagcgtttcgctccgcacaaccccagtgtagatcaggctgatgagtcaccgcattccccacgggcgaccgtggcggtggctgcgctggcggcctgcctatggggcaacccataggacgcttcaatactgacatggtttgaagagtctattgagctaattggtagtcctccggcccctgaatgcggctaatcctaactgcggagcagatacccacacaccagtgggcagtctgtcgtaatgggcaactctgcagcggaaccgactactttgggtgtccgtgtttccttttattcttacactggctgcttatggtgacaattgagagattgttaccatatagctattggattggccatccggtgacaagtagagcaatcgtctacctattttgttgggttttgttccattaaattttaagttttgaaaacccttgactttatcttagcactcaatacggcaaa

SEQ ID NO: 24426 - DNA, 667 bp, synthetic construct; identical to SEQ ID NO: 21456
  source 1..667: mol_type = other DNA

SEQ ID NO: 24427 - DNA, 742 bp, synthetic construct; identical to SEQ ID NO: 20421
  source 1..742: mol_type = other DNA

SEQ ID NO: 24428 - DNA, 728 bp, synthetic construct
  source 1..728: mol_type = other DNA
gggttgttcccacccacagggcccactgggcgctagcacactggtatcgtggtacctttgtgcgcctgttttatccaccctgaccccaaggcaacgtagaagcataccactaaaggtcaataggcgatccagcactccagctgggttatgaccaagcacttctgttaccccggaccgagtaccaataagctgctcacgcggctgaaggggaaagcgttcgttacccaaccaattacttcgagaaacctagtaccaccgtgaaagttgcgcagcgtttcgctcagcacaaccccagtgtagatcaggctgatgagtcaccgcattccccacgggcgaccgtggcggtggctgcgttggcggcctgcccatggggcaacccatgggacgcttcaatactgacatggtgtgaagagtctattgagctaattggtagtcctccggcccctgaatgcggctaatcctaactgcggagcagatacccacacaccagtgggcagtctgtcgtaatgggtaactctgcagcggaaccgactactttgggtgtccgtgtttccttttaatttatactggctgcttatggtgacaattgatagattgttaccatatagctattggattggccatccagtgacaagcagagctatcatttacctgtttgttggttttgtcccattgaattttaaagttctaaaaactattgactttatcttagcactcaatacggcaaa

SEQ ID NO: 24429 - DNA, 618 bp, synthetic construct
  source 1..618: mol_type = other DNA
gatcaacagtaggtgtgacacaccagtcatatcttgatcaagcacttctgtttccccggactgagtatcaataggctgctcgcgcggctgaaggagaaaacgttcgttacccggccaactacttcgagaagcttagtaccaccatgaacgaggcagagtgtttcgttcagcacaaccccagtgtagatcaggctgatgagtcactgcaatccccatgggcgaccatggcagtggctgcgttggcggcctgcccatggagaaatccatgggacgctctaattctgacatggtgcgaagagcctattgagctagctggtagtcctccggcccctgaatgcggctaatccccaactgcggagcacacgctcacaagccagtgggtggtgtgtcgtaacgggcaactctgcagcggaaccgactactttgggtgtccgtgtttccttttattcttatattggctgcttatggtgacaatcaaagaattgttaccatatagctattggattggccatccggtgtgcaatagagcaattgtttatctatttgttggtttcgtgccattgacactgaagtctgtgatcacccgtaactttatcttgaccctcaacacaattaaac

SEQ ID NO: 24430 - DNA, 618 bp, synthetic construct
  source 1..618: mol_type = other DNA
gatcaacagtaggtgtgacataccagtcatatcttgatcaagcacttctgtttccccggactgagtatcaataagctgctcgcgcggctgaaagagaaaacgttcgttacccggccaactacttcgagaagcttagtaccaccatgaacgaggcggagtgtttcgctcggcacaaccccagtgtagatcaggctgatgagtcactgcaatccccatgggcgaccatggcagtggctgcgttggcggcctgcccatggagaaatccatgggacgctctaattctgacatggtgcgaagagcctattgagctagctggtagtcctccggcccctgaatgcggctaatccctaactgcggagcacacacccacaaaccagtgggcagtgtgtcgtaacgggcaactctgcagcggaaccgactactttgggtgtccgtgtttccttttatccttatgttggctgcttatggtgacaatcaaagagttgttaccatatagctattggattggccatccggtgtgcaacagagcaattgtttacctatttattggttttgtaccattgacactgaagtctgtgatcacccgcaattttatcttgaccctcaacacagtcaaac

SEQ ID NO: 24431 - DNA, 747 bp, synthetic construct; identical to SEQ ID NO: 20353
  source 1..747: mol_type = other DNA

SEQ ID NO: 24432 - DNA, 742 bp, synthetic construct; identical to SEQ ID NO: 20463
  source 1..742: mol_type = other DNA

SEQ ID NO: 24433 - DNA, 742 bp, synthetic construct; identical to SEQ ID NO: 20429
  source 1..742: mol_type = other DNA

SEQ ID NO: 24434 - DNA, 742 bp, synthetic construct; identical to SEQ ID NO: 20506
  source 1..742: mol_type = other DNA

SEQ ID NO: 24435 - DNA, 742 bp, synthetic construct; identical to SEQ ID NO: 20188
  source 1..742: mol_type = other DNA

SEQ ID NO: 24436 - DNA, 743 bp, synthetic construct; identical to SEQ ID NO: 1050
  source 1..743: mol_type = other DNA

SEQ ID NO: 24437 - DNA, 743 bp, synthetic construct; identical to SEQ ID NO: 20347
  source 1..743: mol_type = other DNA

SEQ ID NO: 24438 - DNA, 728 bp, synthetic construct
  source 1..728: mol_type = other DNA
ggttgaacccacccacagggcccactgggcgctagcactctggtatcacggtacctttgtgcgcctgttttatatccccttaccccaattgcaacttagaagatgtacatactgatcaatagtgggcatagcacaccagttatgtcttgatcaagcactcctgtatccccggaccaagtatcaatagaccgctcacgcggttgaaggagaaaacgttcgttacccggctaactacttcgagaaacccagtagtatcatgaaagttgcgaggcgtttcgttcagcacatccccagtgtagatcaggtcgatgagtcaccgcgtcccccacgggcgaccgtggcggtggctgcgctggcggcctgcctacggggcaacccgtaggacgcttcaatacagacatggtgcgaagagtcgattgagctagttagtagtcctccggcccctgaatgcggctaatcctaactgcggagcacatgccctcaacccagggggtattgtgtcgtaacgggcaactctgcagcggaaccgactactttgggtgtccgtgtttccttttattcttgtactggctgcttatggtgacaattgaaagattgttaccatatagctattggattggccatccagtgtctaatagagctattgtttatctctttgttggatttataccactcaacctaaaagaagttaaaacactacaactcattatacaactgaatacagcaag

SEQ ID NO: 24439 - DNA, 728 bp, synthetic construct
  source 1..728: mol_type = other DNA
gggttgtacccacccacagggcccactgggcgatagcactctggtatcacggtacctttgtgcgcctgttttatatcccccttcccaattgtaacttagaagatgtacacactgatcaatagtgggcatagcacaccagctatgtcttgatcaagcacttctgtatccccggaccaagtatcaatagactgctcacgcggttgaaggagaaaatgttcgttacccggctaactacttcgaaaaacccagtagtatcatgaaagttgcgaggcgtttcgttcagcacatccctagtgtagatcaggtcgatgagtcaccgcatcccccacgggcgaccgtggcggtggctgcgctggcggcctgcctacggggcaacccgtaggacgcttcaatacagacatggtgcgaagagtcgattgagctagttagtagtcctccggcccctgaatgcggctaatcctaactgcggagcacatgccctcaacccagggggtattgtgtcgtaacgggcaactctgcagcggaaccgactactttgggtgtccgtgtttccttttatttttatactggctgcttatggtgacaattgtaagattgttaccatatagctattggattggccatccagtgtctaatagagctatcatttacctctttgttggatttataccacttaacctaaaagaagttaaaacactacagctcattatacaactgaacacagcaaa

SEQ ID NO: 24440 - DNA, 743 bp, synthetic construct; identical to SEQ ID NO: 1049
  source 1..743: mol_type = other DNA

SEQ ID NO: 24441 - DNA, 742 bp, synthetic construct; identical to SEQ ID NO: 20226
  source 1..742: mol_type = other DNA

SEQ ID NO: 24442 - DNA, 731 bp, synthetic construct
  source 1..731: mol_type = other DNA
gtgggttgtacccgcccacaggacccactgggtgctagcactctggtaccgcggtacctttgtgtgcctgttttatatccccttccccaaattgcaacttagaagctgcacacactgatcaatagagggcgtagcacaccagctatgtcttgatcaagcactcctgtatccccggactaagtatcaatagactgctcacgcggttgaaggagaaaacgttcgttacccggctaactacttcgagaaacccagtagtaccatgaaagttgcgaggcgtttcgttcggcacattcccagtgtagatcaggtcgatgagtcaccgcgttccccacgggtgaccgtggcggtggctgcgttggcggcctgcctacggggcgacccgtaggacgcttcaatacggacatggtgcgaagagtcgattgagctagttagtagtcctccggcccctgaatgcggctaatcctaactgcggagcacatgccctcaacccagggggtattgtgtcgtaacgggcaactctgcagcggaaccgactactttgggtgtccgtgtttccttttattcttacatcggctgcttatggtgacaattgaaaggttgttaccatatagctattggattggccatccattgtctaatagagctattatatacctctttgttggatttataccacttaacctaaaagaagtcaagacactacaacttattatacaactgaatacagcaag

SEQ ID NO: 24443 - DNA, 725 bp, synthetic construct
  source 1..725: mol_type = other DNA
tgtacccacccacagggcccactgggcgctagcactctggtatcacggtacctttgtgcgcctgttttatgtcccctttccctaattgcaacttagaagatgtacacaatgatcaatagcgggcgtagcacaccagctatgtcttgatcaagcactcctgtttccccggaccaagtatcaatagactgctcacgcggttgaaggagaaaacgttcgtcacccggctaactacttcgagaaacccagtagtatcatgaaagttgcgaggcgtttcgttcagcacatccccagtgtagatcaggccgatgagtcaccgcgttccccacgggcgaccgtggcggtggctgcgctggcggcctgcctacggggcgacccgtaggacgcttcaatacagacatggtgcgaagagtcgattgagctagttagtggtcctccggcccctgaatgcggctaatcctaactgcggagcacatgccctcaacccagggggtattgtgtcgtaacgggcaactctgcagcggaaccgactactttgggtgtccgtgtttccttttattctcatactggctgcttatggtgacaattgaaagattgttaccatatagctattggattggccatccagtgtctaacagagctattatttacctctttgctggatttataccactcaacctaaaagaagttaagacactacaactcattatacaactgaacacagcaaa

SEQ ID NO: 24444 - DNA, 744 bp, synthetic construct; identical to SEQ ID NO: 20495
  source 1..744: mol_type = other DNA

SEQ ID NO: 24445 - DNA, 727 bp, synthetic construct
  source 1..727: mol_type = other DNA
gttgaacccacccacagggcccactgggcgctagcactctggtattacggtacctttgtgcgcctgttttatacccccttccccaaattgcaacttagaagatgtgcacactgatcaatagcgggcgtagcacaccagctgtgtcttgatcaagcactcctgtctccccggaccgagtatcaatagactgctcacgcggttgaaggagaaaatgttcgtcatccggctaactacttcgagaaacccagtagtgtcatgaaagttgcgaggcgtttcgttcagcacatccccagtgtagatcaggctgatgagtcaccgcgttccccacgggcgaccgtggcggtggctgcgctggcggcctgcctacggggagacccgtaggacgcttcaatacagacatggtgcgaagagtcgattgagctagttagtagtcctccggcccctgaatgcggctaatcctaactgtggagcacatgccctcaacccagggggtattgtgtcgtaatgggcaactctgcagcggaaccgactactttgggtgtccgtgtttccttttattcttatactggctgcttatggtgacaattgaaaaattgttaccatatagctattggattggccatccagtgactaacagagctattgtttacctctttgttgggtttatatcactcaacctaaaagaagttaagacactaaaactcattatacaactgaacacagcaaa

SEQ ID NO: 24446 - DNA, 742 bp, synthetic construct; identical to SEQ ID NO: 20507
  source 1..742: mol_type = other DNA

SEQ ID NO: 24447 - DNA, 742 bp, synthetic construct; identical to SEQ ID NO: 20162
  source 1..742: mol_type = other DNA

SEQ ID NO: 24448 - DNA, 742 bp, synthetic construct; identical to SEQ ID NO: 20057
  source 1..742: mol_type = other DNA

SEQ ID NO: 24449 - DNA, 735 bp, synthetic construct
  source 1..735: mol_type = other DNA
tgtgggttgtacccactcacagggcccactgggcgctagcactctgattctgcggaatctttgtgcgcctgttttacaacccctcccccaatttgtaatttagaagtagtgcacatcaccgatcaacagcaagcgtggcgcaccagccatgtttagatcaagcacttctgtttccccggactgagtatcaatagactgctcacgcggttgaaggagaaaacgttcgttacccgactaactacttcgagaaacctagtagcaccatcgaaactgcagagtgtttcgctcagcacttcccccgtgtagatcaggtcgatgagtcactgcaatccccacgggcgaccgtggcagtggctgcgttggcggcctgcctatgggcttacccataggacgccctaatgtggacatggtgtgaagagtctattgagctagttagtagtcctccggcccctgaatgcggctaatcctaactgcggagcgcataccctcaatccagggggtggtgtgtcgtaacgggcaactctgcagcggaaccgactactttgggtgtccgtgtttccttttattcttacattggctgcttatggtgacaattgagaaattgttaccatatagctattggattggccatccagtgtctaacagagcaattgtatacttatttgttggattcattccactatcatacacatccattaataccctatactacatcataagattgaacacaagaaa

SEQ ID NO: 24450 - DNA, 732 bp, synthetic construct; identical to SEQ ID NO: 20326
  source 1..732: mol_type = other DNA

SEQ ID NO: 24451 - DNA, 709 bp, synthetic construct; identical to SEQ ID NO: 20673
  source 1..709: mol_type = other DNA

SEQ ID NO: 24452 - DNA, 743 bp, synthetic construct; identical to SEQ ID NO: 19199
  source 1..743: mol_type = other DNA

SEQ ID NO: 24453 - DNA, 742 bp, synthetic construct; identical to SEQ ID NO: 19829
  source 1..742: mol_type = other DNA

SEQ ID NO: 24454 - DNA, 748 bp, synthetic construct; identical to SEQ ID NO: 18768
  source 1..748: mol_type = other DNA

SEQ ID NO: 24455 - DNA, 744 bp, synthetic construct; identical to SEQ ID NO: 20103
  source 1..744: mol_type = other DNA

SEQ ID NO: 24456 - DNA, 747 bp, synthetic construct; identical to SEQ ID NO: 18731
  source 1..747: mol_type = other DNA

SEQ ID NO: 24457 - DNA, 744 bp, synthetic construct; identical to SEQ ID NO: 20318
  source 1..744: mol_type = other DNA

SEQ ID NO: 24458 - DNA, 743 bp, synthetic construct; identical to SEQ ID NO: 20178
  source 1..743: mol_type = other DNA

SEQ ID NO: 24459 - DNA, 742 bp, synthetic construct; identical to SEQ ID NO: 19061
  source 1..742: mol_type = other DNA

SEQ ID NO: 24460 - DNA, 743 bp, synthetic construct; identical to SEQ ID NO: 1043
  source 1..743: mol_type = other DNA

SEQ ID NO: 24461 - DNA, 736 bp, synthetic construct; identical to SEQ ID NO: 18841
  source 1..736: mol_type = other DNA

SEQ ID NO: 24462 - DNA, 744 bp, synthetic construct; identical to SEQ ID NO: 20476
  source 1..744: mol_type = other DNA

SEQ ID NO: 24463 - DNA, 747 bp, synthetic construct
  source 1..747: mol_type = other DNA
tttaaaacagcctgtgggttgcacccactcacagggcccactgggcgttagcactctgattctacggaatctttgtgcgcctgttttataacccctcccccgattcgtaacttagaagtaacacacactattgatcaacagcaagcgtggcgcgccagccatgtttagatcaagcacttctgtttccccggactgagtatcaatagactgctcacgcggttgaaggagaaaacgttcgttacccggctaactacttcgagaaacctagtagcaccatcgaaactgcagagtgtttcgttcagcacttcccccgtgtagatcaggtcgatgagtcactgctacccccacgggcgaccgtggcagtggctgcgttggcggcctgcctatgggcttacccataggacgctctaatgtggacatggtgtgaagagtctattgagctagttagtagtcctccggcccctgaatgcggctaatcctaactgcggagcgcataccctcaatccagggggtggtgcgtcgtaacgggtaactctgcagcggaaccgactactttgggtgtccgtgtttccttttattcttatattggctgcttatggtgacaattgagagattgttaccatatagctattggattggccatccagtgtctaacagagcaattgtacacctatttgttggattcattccactatcatatacatccatcaataccttacactacattataaaattgaactcaaggaa

SEQ ID NO: 24464 - DNA, 747 bp, synthetic construct
  source 1..747: mol_type = other DNA
tttaaaacagcctgtgggttgtacccactcacagggcccactgggcgctagcactctgattctgcggaatctttgtgcgcctgttttataacccctcccccaatccgtaatttagaagtaatgcacaccattgatcaacagcaagcgtggcgcgccagccatgtttagatcaagtacttctgttttcccggactgagtatcaatagactgctcacgcggttgaaggagaaaacgttcgttacccggctaactacttcgagaaacccagtagcaccatcgaaactgcagagtgtttcgctcagcactttccccgtgtagatcaggtcgatgagtcactgcaatccccacgggcgaccgtggcagtggctgcgttggcggcctgcctatgggcttacccataggacgctctaatgtggacatggtgtgaagagtctattgagctagttagtagtcctccggcccctgaatgcggctaatcctaactgcggagcgcataccctcaatccagggggtggtgcgtcgtaacgggcaactctgcagcggaaccgactactttgggtgtccgtgtttccttttattcttatgttggctgcttatggtgacaattgagagattgttaccatatagctattggattggccatccagtgtctaacagagcaattgtatacttatttgttggattcgttccactatcatatacatccactaacactttatactacattataagattgaacacaagaaa

SEQ ID NO: 24465 - DNA, 743 bp, synthetic construct; identical to SEQ ID NO: 19030
  source 1..743: mol_type = other DNA

SEQ ID NO: 24466 - DNA, 745 bp, synthetic construct; identical to SEQ ID NO: 19051
  source 1..745: mol_type = other DNA

SEQ ID NO: 24467 - DNA, 729 bp, synthetic construct; identical to SEQ ID NO: 19258
  source 1..729: mol_type = other DNA

SEQ ID NO: 24468 - DNA, 747 bp, synthetic construct; identical to SEQ ID NO: 18736
  source 1..747: mol_type = other DNA

SEQ ID NO: 24469 - DNA, 746 bp, synthetic construct
  source 1..746: mol_type = other DNA
ttaaaacagcctgtgggttgcacccactcacagggcccacgtggcgctagcactctggttttacggaacctttgtgcgcctgttttacaaccccccccaatttgcaacttagaagcaatacacaacactgatcaacagcaggcatggcgcaccagccatgtcttgatcaagcacttctgtttccccggactgagtatcaatagactgctcacgcggttgaaggagaaagcgtccgttatccggctaactacttcgagaaacctagtagcaccattgaaactgcggagtgtttcgctcggcacttcccccgtgtagatcaggtcgatgagtcactgcaatccccacgggcgaccgtggcagtggctgcgctggcggcctgcctatggggcaacccataggacgctctaatgtggacatggtgcgaagagtctattgagctagttagtagtcctccggcccctgaatgcggctaatcctaactgcggagcacatgccctcaacccagagggtagtgtgtcgtaacgggcaactctgcagcggaaccgactactttgggtgtccgtgtttccttttattcttacattggctgcctatggtgacaatcgcagaattgttaccatatagctattggattggccatccggtgtgcaatagagctattatatacctatttgttggctttgtaccattaaccttaaaatctataactaccctcaactttgtattaactctcaatacagtcaaac

SEQ ID NO: 24470 - DNA, 750 bp, synthetic construct; identical to SEQ ID NO: 1205
  source 1..750: mol_type = other DNA

SEQ ID NO: 24471 - DNA, 747 bp, synthetic construct; identical to SEQ ID NO: 19836
  source 1..747: mol_type = other DNA

SEQ ID NO: 24472 - DNA, 700 bp, synthetic construct
  source 1..700: mol_type = other DNA
ggggttgttcccaccctagaggcccacgtggcggccagtactctggtatcacggtacctttgtacgcctgttttatatccctttccccgtaacttagaagaaaacaattcaagttcactaggagggggtacaaaccagtaccaccacgaacaagcacttctgtttccccggtgatgttgtataaactgtacccacggttgaaaacgactgatccgttatccgctcttgtacttcgagaagcccagtatcaccttgggatcttcgatgcgttgcgttcagcactcaaccccagagtgtagcttaggtcgatgagtctggacactccccaccggcgacggtggtccaggctgcgttggcggcctacctgtggcccaaagccacaggacgctagttgtgaacaaggtgtgaagagcctattgagctacaagagagtcctccggcccctgaatgcggctaatcctaaccacggagcaagagtgcacaaaccagtacatgtcttgtcgtaacgcgcaagtctgtggcggaaccgactactttgggtgtccgtgtttccttttatttttatcatggctgcttatggtgacaatctaagattgttatcatatagctattggattggccatccggtaattcgttgagatttgagcatttgcttattcctttaacaattttaactgttcactacactccaacagtcaaa

SEQ ID NO: 24473 - DNA, 746 bp, synthetic construct; identical to SEQ ID NO: 1137
  source 1..746: mol_type = other DNA

SEQ ID NO: 24474 - DNA, 750 bp, synthetic construct; identical to SEQ ID NO: 1204
  source 1..750: mol_type = other DNA

SEQ ID NO: 24475 - DNA, 734 bp, synthetic construct; identical to SEQ ID NO: 19970
  source 1..734: mol_type = other DNA

SEQ ID NO: 24476 - DNA, 747 bp, synthetic construct; identical to SEQ ID NO: 1161
  source 1..747: mol_type = other DNA

SEQ ID NO: 24477 - DNA, 748 bp, synthetic construct; identical to SEQ ID NO: 19821
  source 1..748: mol_type = other DNA

SEQ ID NO: 24478 - DNA, 748 bp, synthetic construct; identical to SEQ ID NO: 1181
  source 1..748: mol_type = other DNA

SEQ ID NO: 24479 - DNA, 747 bp, synthetic construct; identical to SEQ ID NO: 1157
  source 1..747: mol_type = other DNA

SEQ ID NO: 24480 - DNA, 747 bp, synthetic construct; identical to SEQ ID NO: 20043
  source 1..747: mol_type = other DNA

SEQ ID NO: 24481 - DNA, 726 bp, synthetic construct; identical to SEQ ID NO: 20717
  source 1..726: mol_type = other DNA

SEQ ID NO: 24482 - DNA, 746 bp, synthetic construct; identical to SEQ ID NO: 1141
  source 1..746: mol_type = other DNA

SEQ ID NO: 24483 - DNA, 729 bp, synthetic construct; identical to SEQ ID NO: 20241
  source 1..729: mol_type = other DNA

SEQ ID NO: 24484 - DNA, 733 bp, synthetic construct; identical to SEQ ID NO: 20141
  source 1..733: mol_type = other DNA

SEQ ID NO: 24485 - DNA, 858 bp, synthetic construct
  source 1..858: mol_type = other DNA
ctcaaacccgctgatcagcctcgactgtgccttctagttgccagccatctgttgtttgcccctcccccgtgccttccttgagaattcctcgacgtagatatcttaaaacagctctggggttgtacccaccccagaggcccacgtggcggctagtactccggtattgcggtacctttgtacgcctgttttatactcccttcccccgtaacttagaagcacaatgtccaagttcaataggagggggtgcaaaccagtaccaccacgaacaagcacttctgttcccccggtgaggctgtataggctgtttccacggctaaaagcggctgatccgttatccgctcatgtacttcgagaagcctagtatcaccttggaatcttcgatgcgttgcgctcaacactcaaccccagagtgtagcttaggtcgatgagtctggacgttcctcaccggcgacggtggtccaggctgcgttggcggcctacctgtggcccaaagccacaggacgctagttgtgaacaaggtgtgaagagcctattgagctacctgagagtcctccggcccctgaatgcggctaatcctaaccacggagcaggcagtggcaatccagcgaccagcctgtcgtaacgcgcaagttcgtggcggaaccgactactttgggtgtccgtgtttccttttatttttacaatggctgcttatggtgacaatcattgattgttatcataaagcaaattggattggccatccggtgagaatttgattattaaattactctcttgttgggattgctcctttgaaatcttgtgcactcacacctattggaattacctcattgttaagatacgcgtctagctagcgccacc

SEQ ID NO: 24486 - DNA, 749 bp, synthetic construct; identical to SEQ ID NO: 18767
  source 1..749: mol_type = other DNA

SEQ ID NO: 24487 - DNA, 747 bp, synthetic construct; identical to SEQ ID NO: 1158
  source 1..747: mol_type = other DNA

SEQ ID NO: 24488 - DNA, 745 bp, synthetic construct; identical to SEQ ID NO: 1093
  source 1..745: mol_type = other DNA

SEQ ID NO: 24489 - DNA, 735 bp, synthetic construct; identical to SEQ ID NO: 20094
  source 1..735: mol_type = other DNA

SEQ ID NO: 24490 - DNA, 701 bp, synthetic construct; identical to SEQ ID NO: 20926
  source 1..701: mol_type = other DNA

SEQ ID NO: 24491 - DNA, 752 bp, synthetic construct; identical to SEQ ID NO: 19872
  source 1..752: mol_type = other DNA

SEQ ID NO: 24492 - DNA, 722 bp, synthetic construct; identical to SEQ ID NO: 20722
  source 1..722: mol_type = other DNA

SEQ ID NO: 24493 - DNA, 726 bp, synthetic construct; identical to SEQ ID NO: 20541
  source 1..726: mol_type = other DNA

SEQ ID NO: 24494 - DNA, 725 bp, synthetic construct; identical to SEQ ID NO: 20721
  source 1..725: mol_type = other DNA

SEQ ID NO: 24495 - DNA, 747 bp, synthetic construct; identical to SEQ ID NO: 20097
  source 1..747: mol_type = other DNA

SEQ ID NO: 24496 - DNA, 727 bp, synthetic construct; identical to SEQ ID NO: 20533
  source 1..727: mol_type = other DNA

SEQ ID NO: 24497 - DNA, 745 bp, synthetic construct; identical to SEQ ID NO: 19847
  source 1..745: mol_type = other DNA

SEQ ID NO: 24498 - DNA, 749 bp, synthetic construct; identical to SEQ ID NO: 1191
  source 1..749: mol_type = other DNA

SEQ ID NO: 24499 - DNA, 754 bp, synthetic construct; identical to SEQ ID NO: 19869
  source 1..754: mol_type = other DNA

SEQ ID NO: 24500 - DNA, 747 bp, synthetic construct; identical to SEQ ID NO: 20026
  source 1..747: mol_type = other DNA

SEQ ID NO: 24501 - DNA, 715 bp, synthetic construct; identical to SEQ ID NO: 882
  source 1..715: mol_type = other DNA

SEQ ID NO: 24502 - DNA, 709 bp, synthetic construct
  source 1..709: mol_type = other DNA
aggcccacgtggcggccagtactctggtattacggtacctttgtacgcctgttttatatcccttcccccaatgtaacttagaagttcttaaacatagctcaatagacagtagtacacaccagtactgctacgagcaagcacttctgttaccccggtgaagttacatagactgtacccacggttgaaagcgactgatccgttatccgctttagtacttcgagaagcctagtaatatcttggaatcttcgatgcgttgcgctcaacactcaaccccagagtgtagcttaggtcgatgagtctggacattccccaccggcgacggtggtccaggctgcgttggcggcctacctgtgacccaaagtcacaggacgctagttgtgaacaaggtgtgaagagcctattgagctactaaagagtcctccggcccctgaatgcggctaatcccaaccacggagcaagtgctcacaacccagtgagtggcttgtcgtaacgagtaattctgtggcggaaccgactactttgggtgtccgtgtttcctttatttttatcattggctgcttatggtgacaatctaagattgccatcatatagcttttggattggccatccggtgatattttgagttattcaaattgctatttacagcattctttgtacactgttcattcatcactatttgcattttgttcttgaattttaaacagtcaaa

SEQ ID NO: 24503 - DNA, 721 bp, synthetic construct; identical to SEQ ID NO: 20703
  source 1..721: mol_type = other DNA

SEQ ID NO: 24504 - DNA, 742 bp, synthetic construct; identical to SEQ ID NO: 20532
  source 1..742: mol_type = other DNA

SEQ ID NO: 24505 - DNA, 742 bp, synthetic construct; identical to SEQ ID NO: 19855
  source 1..742: mol_type = other DNA

SEQ ID NO: 24506 - DNA, 743 bp, synthetic construct; identical to SEQ ID NO: 20373
  source 1..743: mol_type = other DNA

SEQ ID NO: 24507 - DNA, 720 bp, synthetic construct; identical to SEQ ID NO: 20697
  source 1..720: mol_type = other DNA

SEQ ID NO: 24508 - DNA, 743 bp, synthetic construct; identical to SEQ ID NO: 20167
  source 1..743: mol_type = other DNA

SEQ ID NO: 24509 - DNA, 744 bp, synthetic construct; identical to SEQ ID NO: 20500
  source 1..744: mol_type = other DNA

SEQ ID NO: 24510 - DNA, 743 bp, synthetic construct; identical to SEQ ID NO: 20367
  source 1..743: mol_type = other DNA

SEQ ID NO: 24511 - DNA, 738 bp, synthetic construct
  source 1..738: mol_type = other DNA
tccgatctgtgggttgttcccacccacagggcccactgggcgctagcacactggtattgcggtacctttgtgcgcctgttttatccaccctcccccactgtaacttagaagcttagcacagacggtcaatagacagcccaacacaccagttgggttttgaccaagcacttctgttaccccggaccgagtatcaataggctgctcgcgcggctgaaggagaaaacgttcgtcacccggccaattacttcgagaaacccagtaacaccatgaaagttgcgcagtgtttcgctccgcacaaccccagtgtagatcaggtcgatgagtcaccgcattccccacgggcgaccgtggcggtggctgcgctggcggcctgcccatggggtgacccatgggacgcttcaataccgacatggtgcgaagagtctattgagctaattggtagtcctccggcccctgaatgcggctaatcccaactgcggagcagatacccacatgccagtgggcagtctgtcgtaatgggtaactctgcagcggaaccgactactttgggtgtccgtgtttcctcttatacatattctggctgcttatggtgacaattgaaagattgttaccatatagctattggattggccatccggtgacaaacagagcgatcatattcctttttattggatttgtgccacttagctatagcagttacggtactctaatctacatccttcacttgaatacgagaaa

SEQ ID NO: 24512 - DNA, 742 bp, synthetic construct; identical to SEQ ID NO: 20471
  source 1..742: mol_type = other DNA

SEQ ID NO: 24513 - DNA, 742 bp, synthetic construct; identical to SEQ ID NO: 20253
  source 1..742: mol_type = other DNA

SEQ ID NO: 24514 - DNA, 720 bp, synthetic construct; identical to SEQ ID NO: 20725
  source 1..720: mol_type = other DNA

SEQ ID NO: 24515 - DNA, 742 bp, synthetic construct; identical to SEQ ID NO: 20525
  source 1..742: mol_type = other DNA

SEQ ID NO: 24516 - DNA, 743 bp, synthetic construct; identical to SEQ ID NO: 20323
  source 1..743: mol_type = other DNA

SEQ ID NO: 24517 - DNA, 742 bp, synthetic construct; identical to SEQ ID NO: 20142
  source 1..742: mol_type = other DNA

SEQ ID NO: 24518 - DNA, 742 bp, synthetic construct; identical to SEQ ID NO: 20263
  source 1..742: mol_type = other DNA

SEQ ID NO: 24519 - DNA, 744 bp, synthetic construct; identical to SEQ ID NO: 20390
  source 1..744: mol_type = other DNA

SEQ ID NO: 24520 - DNA, 744 bp, synthetic construct
  source 1..744: mol_type = other DNA
ttaaaacaggcctgtgggttgttcccacccacagggcccaccgggcgttagcacactggtatctcggtacctttgtgcgcctgttttatccacccttttcccatctaacttagaagcatgcgccaagacggtcaatagggagcccagtaaaccaattgggctatgaccaagcacttctgtaaccccgggccgagtatcaataagctgctcgcgcggctgaaggagaaaaagctcgttacccggccaattacttcgagaaacccagtagcatcatgaaagttgcgcagcgtttcgctccacacaaccccagtgtagatcaggctgatgagtcaccgcgttccccacgggcgaccgtggcggtggctgcgctggcggcctgcccatggggccacccatgggacgcttcaatactgacatggtgtgaagagtctattgagctaattggtagtcctccggcccctgaatgcggctaatcctaactgcggagcagatgcccacgcaccagtgggaagtctgtcgtaacgggtaactctgcagcggaaccgactactttgggtgtccgtgtttccttttatttctactctggctgcttatggtgacaattgaaaggttgttaccatatagctattggattggccatccggtgtcaaatagagcgattatttacttgtttgttgggtttgtaccattgaactacaaagttttaaacactcttaactatattttaatcctcaactcattaaa

SEQ ID NO: 24521 - DNA, 743 bp, synthetic construct
  source 1..743: mol_type = other DNA
ataaaacagcctgtgggttgtacccacccacagggcccactgggcgctagcactctggtattacggtacccttgtgcgcctgttttatcttcccttccctcagtgcaacttagaagtataatcttaatgatcagtaggtggctcagcatgccagctgggtcttgatcaagcacttctgttaccccggactgagtatcaataagctgctcgcgcggctgaaggagaaagcgttcgttacccggccaattacttcgagaaacctagtaccaccatggaagttgcgcggcgtttcgctccgcacaatcccagtgtagatcaggtcgatgagtcaccgcattccccacgggcgaccgtggcggtggctgcgttggcggcctgcccatggggcaacccatgggacgcttcaatactgacatggtgcgaagagtctattgagctaattggtagtcctccggcccctgaatgcggctaatcctaactgcggagcagatacccacaagccagtgggcgatctgtcgtaacgggcaactctgcagcggaaccgactactttgggtgtccgtgtttctttttattcctatactggctgcttatggtgacaattgagaaattgttaccatatagctattggattggccatccggtgactaacagagcaattgtatacctgtttgttggttttgtgccattgaacttcaaagttttaaaaacactcaatttaataattctacttaatacaacaag

SEQ ID NO: 24522 - DNA, 737 bp, synthetic construct
  source 1..737: mol_type = other DNA
gaagggtgggttgttcccacccacagggcccactgggcgttagcacactggtatctcggtacccttgtgcgcctgttttatatacccttccccctaaagtaaatcagaagttcgactataacggtcaataggaaacccagtgcaccaactgggtcacgaccaagcactcctgtaaccccggactgagtatcaataagctgctcgtgcggctgaaggagaaaacgttcgttacccggccaattacttcgagaaacctagtaccaccatgaaagttgcgcagcgtttcgctccgcacaaccccagtgtagatcaggtcgatgagccaccgcgttccccacgggtgaccgtggcggtggctgcgttggcggcctgcccatggggctacccatgggacgcttcaatactgacatggtgcgaagagtctattgagctaattggtagtcctccggcccctgaatgcggctaatcctaactgcggagcagatacccacacaccagtgggcggtctgtcgtaacgggcaactctgcagcggaaccgactactttgggtgtccgtgtttccttttattcttatactggctgcttatggtgacaattgagagattgttaccatatagctattggattggccatccggtgtctaacagagcaatcatttatctgtttgttggattcgtacccttgaatcttaaagtcctcaacactctcaacctcgtgctacaactaaactcggcaaa

SEQ ID NO: 24523 - DNA, 744 bp, synthetic construct
  source 1..744: mol_type = other DNA
ttataacagcctgtgggttgttcccacccacagggcccaccgggcgctagcacactggtatctcggtacctttgtgcgcctgttttatccacccttttcccatttaacttagaagcacgcaccaagacggtcaatagggagcccagtaaaccaattgggctatgaccaagcacttctgtaaccccgggccgagtatcaataagctgctcgcgcggctgaaggagaaaaagctcgttacccggccaattacttcgagaaacccagtagcatcatgaaagttgcgcagcgtttcgctccacacaaccccagtgtagatcaggccgatgagtcaccgcgttccccacgggtgaccgtggcggtggctgcgctggcggcctgcccatggggccacccatgggacgcttcaatattgacatggtgtgaagagtctattgagctaattggtagtcctccggcccctgaatgcggctaatcctaactgcggagcagatgcccacataccagtgggaagtctgtcgtaacgggtaactctgcagcggaaccgactactttgggtgtccgtgtttccttttatttctactctggctgcttatggtgacaattgaaaggttgttaccatatagctattggatcggccatccggtgtcaaatagagcgattatttacttgtttgttgggtttgtaccactgaactacaaagttttaaacactcttaactacatcttaatccttaactcatcaaaa

SEQ ID NO: 24524 - DNA, 729 bp, synthetic construct
  source 1..729: mol_type = other DNA
gtgggttgttcccacccacagggcccactgggcgctagcacactggtatcacggtacctttgtgcgcctgttttatccaccctcccccagagaaacttagaagcatgatctaaacggtcaatagaaaacctagcacaccagctgggacacgaccaagcactcctgtaaccccggaccgagtatcaataggctgctcacgtggctgaaggagaaaacgttcgttacccggccaattacttcgagaaacccagtaccaccatgaacgttgcgcagcgtttcgctccgcacaatcccagtgtagatcaggccgatgagtcaccgcattccccacgggcgaccgtggcggtggctgcgttggcggcctgcccatggggcaacccatgggacgctacaatactgacatggtgcgaagagtctattgagctaattggtagtcctccggcccctgaatgcggctaatcctaactgcggagcagatacccacacaccagtgggcagtctgtcgtaacgggtaactctgcagcggaaccgactactttgggtgtccgtgtttccttttatcttttactggctgcttatggtgacaattgagagattgttaccatatagctattggattagccatccggtgtctaatagagcaattatttatctgttcgttggattcgtacctttgaactacaaagtttttaaaactctcaacctcgtcttacgattcaactctgcaaa

SEQ ID NO: 24525 - DNA, 743 bp, synthetic construct; identical to SEQ ID NO: 20220
  source 1..743: mol_type = other DNA

SEQ ID NO: 24526 - DNA, 743 bp, synthetic construct; identical to SEQ ID NO: 20450
  source 1..743: mol_type = other DNA

SEQ ID NO: 24527 - DNA, 742 bp, synthetic construct; identical to SEQ ID NO: 1013
  source 1..742: mol_type = other DNA

SEQ ID NO: 24528 - DNA, 743 bp, synthetic construct; identical to SEQ ID NO: 20301
  source 1..743: mol_type = other DNA

SEQ ID NO: 24529 - DNA, 742 bp, synthetic construct; identical to SEQ ID NO: 20543
  source 1..742: mol_type = other DNA

SEQ ID NO: 24530 - DNA, 744 bp, synthetic construct; identical to SEQ ID NO: 20330
  source 1..744: mol_type = other DNA

SEQ ID NO: 24531 - DNA, 743 bp, synthetic construct; identical to SEQ ID NO: 20173
  source 1..743: mol_type = other DNA

SEQ ID NO: 24532 - DNA, 741 bp, synthetic construct; identical to SEQ ID NO: 20191
  source 1..741: mol_type = other DNA

SEQ ID NO: 24533 - DNA, 739 bp, synthetic construct
  source 1..739: mol_type = other DNA
ttaaaacagcctgtgggttgttcccacccacagggcccactgggcgtcagcacactggtattgcggtacccttgtgcgcctgttttatctacccctccccaatgtaacttagaagcatgctacacacggtcaatagacggttcagtacgccaactgaatcacgaccaagcacttctgttgccccggactgagtatcaataggctgctcgcgcggctgaaggagaaaacgttcgttacccggccaattacttcgagaaacccagtaccaccatggaggttgcgccagtttcgctccgcacaaccccagtgtagatcaggtcgatgagtcaccgcaatcccacaggcgactgtggcggtggctgcgttggcggcctgccatgagcgcagctcatgggacgcttcaatactgacatggtgcgaagagtccattgagctaattggtagtctccggcccctgaatgcggctaatcccaactgcggagcagacacccacaagccagtgggcagtctgtcgtaacgggtaactctgcagcggaaccgactactttgggtgtccgtgtttccttttattcttatactggctgcttatggtgacaattgagagattgttaccatatagctattggattggccacccggtgtctaacagagcgattatttacctctttgttggatacataccactaaatcacaaagttttaaagactctcaactttatattaatacttaactcagcaag

SEQ ID NO: 24534 - DNA, 741 bp, synthetic construct; identical to SEQ ID NO: 20269
  source 1..741: mol_type = other DNA

SEQ ID NO: 24535 - DNA, 743 bp, synthetic construct; identical to SEQ ID NO: 20393
  source 1..743: mol_type = other DNA

SEQ ID NO: 24536 - DNA, 742 bp, synthetic construct; identical to SEQ ID NO: 20138
  source 1..742: mol_type = other DNA

SEQ ID NO: 24537 - DNA, 720 bp, synthetic construct; identical to SEQ ID NO: 20611
  source 1..720: mol_type = other DNA

SEQ ID NO: 24538 - DNA, 750 bp, synthetic construct; identical to SEQ ID NO: 19834
  source 1..750: mol_type = other DNA

SEQ ID NO: 24539 - DNA, 744 bp, synthetic construct; identical to SEQ ID NO: 18741
  source 1..744: mol_type = other DNA

SEQ ID NO: 24540 - DNA, 714 bp, synthetic construct; identical to SEQ ID NO: 879
  source 1..714: mol_type = other DNA

SEQ ID NO: 24541 - DNA, 732 bp, synthetic construct
  source 1..732: mol_type = other DNA
ttaaagctcgagggttgttcccaccctagaggcccacgtggcggccagtactctggtattacggtacctttgtacgcctgttttatatcccttcccccaatgtaacttagaagttcttaaacatagctcaatagacagtagtacgcaccagtactgctacgagcaagcacttctgttaccccggtgaagttacatagactgtacccacggttgaaagtgactgatccgttatccgctttagtacttcgagaagcccagtaataccttggaatcttcgatgcgttgcgctcaacactcaaccccagagtgtagcttaggtcgatgagtctggacattccccaccggcgacggtggtccaggctgcgttggcggcctacctgtggcccaaagccacaggacgctagttgtgaacaaggtgtgaagagcctattgagctactaaagagtcctccggcccctgaatgcggctaatcccaaccacggagcaagtgctcacaacccagtgagtggcttgtcgtaacgagtaattctgtggcggaaccgactactttgggtgtccgtgtttcctttattctttatcattggctgcttatggtgacaatctaagattgttatcatatagcttttggattggccatccggtgatattttgagtcgttcaaattgctattttgtgcactgctcattcataaccatttacatcttgttcttgagttgcttctaaacaatcaaa

SEQ ID NO: 24542 - DNA, 746 bp, synthetic construct; identical to SEQ ID NO: 19871
  source 1..746: mol_type = other DNA

SEQ ID NO: 24543 - DNA, 709 bp, synthetic construct
  source 1..709: mol_type = other DNA
ttaaaacaagcccttgggtgttcccaccccagaggcccacgtggcggctagtactctggtatcacggtacctttgtacgcctgttttacatcccctccccaagtaactttagaagcgagtcataaagttcaacagaagggggtgcaaaccagcaccaccacgaacaagcacttctgtttccccggtgaagctgtatagactgtccccacggttgaaaatggcagatccgttatccgctcacgtacttcgagaagcctagtatcaccttggaatcttcgatgcgttgcgctcagcactctaccccgagtgtagcttaggtcgatgagtctgggcataccccaccggcgacggtggcccaggctgcgttggcggcctacccatggttaacaccatgggacgctagttgtgaacaaggtgtgaagagcctattgagctacctgagagtcctccggcccctgaatgcggctaatcccaaccacggagcaagtgcccacaaaccagtgggtaacttgtcgtaacgcgcaagtctgtggcggaaccgactactttgggtgtccgtgtttccttttattttttatcatggctgcttatggtgacaatctaagattgttatcatatagctattggactggccatccggtaattttgaaagtgatattggccttgttatttcattgcatctgtttattcacaatactgcaaactcaca

SEQ ID NO: 24544 - DNA, 715 bp, synthetic construct; identical to SEQ ID NO: 883
  source 1..715: mol_type = other DNA

SEQ ID NO: 24545 - DNA, 714 bp, synthetic construct
  source 1..714: mol_type = other DNA
ttttttaaaacagctctggggttgttcccaccccagaggcccacgtggcggctagtactctggtattaaggtacctttgtacgcctgttttatctcccctcccccaagtaactttagaagtaattcaaacagttcaatagagggggtacaaaccagtaccaccacgaacaagcacttctgtttccccggtgaagctgtatagactgtacccacggtcgaaaacggtagatccgttatccgctcaagtacttcgagaagcctagtattaccttggaatcttcgatgcgttgcactcagcactctacccccgagtgtagcttaggtcgatgagtctgggcataccccaccggtaacggtggcccaggctgcgttggcggcctacccatggctaacgccatgggacgctagttgtgaacaaggtgtgaagagcctattgagctacttgagagtcctccggcccctgaatgcggctaatcccaaccacggagcaagtgcctgcatgccagcaggtagcttgtcgtaacgcgtaagtctgtggcgggaccgactactttgggtgtccgtgtttccttttattcttattatggctgcttatggtgacaatctaagattgttatcatatagcttttggattggccatccggtaattattcgactttcaaacgctcgtttatcttatttcatcacacatccgtttgattaattgactataca

SEQ ID NO: 24546 - DNA, 812 bp, synthetic construct; identical to SEQ ID NO: 19809
  source 1..812: mol_type = other DNA

SEQ ID NO: 24547 - DNA, 722 bp, synthetic construct; identical to SEQ ID NO: 20749
  source 1..722: mol_type = other DNA

SEQ ID NO: 24548 - DNA, 797 bp, synthetic construct; identical to SEQ ID NO: 19807
  source 1..797: mol_type = other DNA

SEQ ID NO: 24549 - DNA, 813 bp, synthetic construct; identical to SEQ ID NO: 19782
  source 1..813: mol_type = other DNA

SEQ ID NO: 24550 - DNA, 811 bp, synthetic construct; identical to SEQ ID NO: 19808
  source 1..811: mol_type = other DNA

SEQ ID NO: 24551 - DNA, 813 bp, synthetic construct; identical to SEQ ID NO: 19786
  source 1..813: mol_type = other DNA

SEQ ID NO: 24552 - DNA, 790 bp, synthetic construct; identical to SEQ ID NO: 19810
  source 1..790: mol_type = other DNA

SEQ ID NO: 24553 - DNA, 798 bp, synthetic construct; identical to SEQ ID NO: 20715
  source 1..798: mol_type = other DNA

SEQ ID NO: 24554 - DNA, 813 bp, synthetic construct; identical to SEQ ID NO: 19787
  source 1..813: mol_type = other DNA

SEQ ID NO: 24555 - DNA, 802 bp, synthetic construct; identical to SEQ ID NO: 20773
  source 1..802: mol_type = other DNA

SEQ ID NO: 24556 - DNA, 811 bp, synthetic construct; identical to SEQ ID NO: 19802
  source 1..811: mol_type = other DNA

SEQ ID NO: 24557 - DNA, 805 bp, synthetic construct; identical to SEQ ID NO: 19789
  source 1..805: mol_type = other DNA

SEQ ID NO: 24558 - DNA, 811 bp, synthetic construct; identical to SEQ ID NO: 1251
  source 1..811: mol_type = other DNA

SEQ ID NO: 24559 - DNA, 801 bp, synthetic construct; identical to SEQ ID NO: 20705
  source 1..801: mol_type = other DNA

SEQ ID NO: 24560 - DNA, 815 bp, synthetic construct; identical to SEQ ID NO: 19785
  source 1..815: mol_type = other DNA

SEQ ID NO: 24561 - DNA, 789 bp, synthetic construct; identical to SEQ ID NO: 20709
  source 1..789: mol_type = other DNA

SEQ ID NO: 24562 - DNA, 787 bp, synthetic construct; identical to SEQ ID NO: 20793
  source 1..787: mol_type = other DNA

SEQ ID NO: 24563 - DNA, 769 bp, synthetic construct; identical to SEQ ID NO: 20802
  source 1..769: mol_type = other DNA

SEQ ID NO: 24564 - DNA, 813 bp, synthetic construct; identical to SEQ ID NO: 19793
  source 1..813: mol_type = other DNA

SEQ ID NO: 24565 - DNA, 811 bp, synthetic construct; identical to SEQ ID NO: 20521
  source 1..811: mol_type = other DNA

SEQ ID NO: 24566 - DNA, 811 bp, synthetic construct
  source 1..811: mol_type = other DNA
ttaaaacagcctgtgggttgttcccacccacagggcccactgggcgctagtacactggtatgccttacctcggtattacggtaccggtgtatatagtacccttgtacgcctgttttatatcccttcccccaaacgtaactttagaagtttaaaataatgacgaccaataggagtccaacatccagttggattgcggtcaagcacttctgtctccccggacctagtagtgataggctgtacccacggccgaagatgaacccgtccgttatccggccagctacttcgagaagcctagtaacatcaaagatctgtcttggcgtttcgctcagcgcgttccccccgtgtagatcgggctgatgggtctccgcataccccacgggcgaccgtggcggaggccgcgtggcggcccgcctatggcgaaagccataggacgccatttcagtgacagggtgtgaagagcctattgagctagttggtagtcctccggcccctgaatgcggctaatcctaaccacggagcgtccaccagcaaaccagctgacagggcgtcgtaacgggtaactctgtggcggaaccgactactttgggtgtccgtgtttccttttgatcctattttggctgcttatggtgacaacgataagttgttatcataaagcttttgggttggccacctggaaaaggttatcagtgtttgatattgttcggctttcacgcctaccaataaaacaagccttgtatttccctatttcattttatccggcaaaagatattacggaatttcatctgaaccttttgctctcattatcaacaag

SEQ ID NO: 24567 - DNA, 808 bp, synthetic construct; identical to SEQ ID NO: 20674
  source 1..808: mol_type = other DNA

SEQ ID NO: 24568 - DNA, 795 bp, synthetic construct; identical to SEQ ID NO: 20700
  source 1..795: mol_type = other DNA

SEQ ID NO: 24569 - DNA, 784 bp, synthetic construct; identical to SEQ ID NO: 21116
  source 1..784: mol_type = other DNA

SEQ ID NO: 24570 - DNA, 802 bp, synthetic construct; identical to SEQ ID NO: 20666
  source 1..802: mol_type = other DNA

SEQ ID NO: 24571 - DNA, 802 bp, synthetic construct
  source 1..802: mol_type = other DNA
acagtctatgggttgttcccaccctagagcccactgggcgctagtacactggtacgccagtaccttggtatcacggtatcattgtacgtcagtacctttgtatgcctgttttatgccccttcccccaatgtaactttagaagcttacaaaacaaagaccactaggagtccaacacccagttggattgcggtcaagcacttctgtttccccggacctagtagtgataggctgtacccacggccgaagatgaacccgtccgttatccggccagctacttcgagaagcctagtagcatcaaagatctgtcttggcgtttcgctcagcgcgttccccccgcgtagatcgggctgatgggtctccgcatcccccacgggcgaccgtggcggaggccgcgtggcggcccgcctatggcgaaagccataggacgccatttcagtgacagggtgtgaagagcctattgagctagttggtagtcctccggcccctgaatgcggctaatcctaaccacggagcgtccaccagcaaaccagctggcagggcgtcgtaacgggtaactcggtggcggaaccgactactttgggtgtccgtgtttccttttgatcctatttggctgcttatggtgacaacgataagttgttatcataaagcttttgggttggccacctggaaaaagttatcagtgtttgatattgttcggctttcacgcctaccaataaaacaagccctttacttgttagttgctttttatcccacaaaggatattactgagtttcacttacaactcttgctaacattgtcaaca

SEQ ID NO: 24572 - DNA, 792 bp, synthetic construct; identical to SEQ ID NO: 20733
  source 1..792: mol_type = other DNA

SEQ ID NO: 24573 - DNA, 801 bp, synthetic construct; identical to SEQ ID NO: 19794
  source 1..801: mol_type = other DNA

SEQ ID NO: 24574 - DNA, 813 bp, synthetic construct; identical to SEQ ID NO: 20473
  source 1..813: mol_type = other DNA

SEQ ID NO: 24575 - DNA, 811 bp, synthetic construct; identical to SEQ ID NO: 20491
  source 1..811: mol_type = other DNA

SEQ ID NO: 24576 - DNA, 795 bp, synthetic construct; identical to SEQ ID NO: 20724
  source 1..795: mol_type = other DNA

SEQ ID NO: 24577 - DNA, 813 bp, synthetic construct; identical to SEQ ID NO: 19784
  source 1..813: mol_type = other DNA

SEQ ID NO: 24578 - DNA, 716 bp, synthetic construct; identical to SEQ ID NO: 21427
  source 1..716: mol_type = other DNA

SEQ ID NO: 24579 - DNA, 803 bp, synthetic construct
  source 1..803: mol_type = other DNA
acagtccgtgggttgttcccatccacagagcctactgggcgctagtacaccggtacgccagtaccttggtatcacggtaccatcgtacgccagtacccttgtacgcctgttttataccccttcccatgcaactttagaagtttaaataaacaaagaccaataggagtccaacaaccagttggattgcggtcaagcacttctgtctccccggacctagtagtgataggctgtacccacggccgaagatgaacccgtccgttacccggccagctacttcgagaagcctagtagcatcaaagatctgtcttggcgtttcgctcagcgcgttcccccccgcgtagatcgggctgatgggtctccgcatcccccacgggcgaccgtggcggaggccgcgtggcggcccgcctatggcgaaagccataggacgccatttcagtgacagggtgtgaagagcctattgagctagttggtagtcctccggcccctgaatgcggctaatcctaaccacggagcgtccaccagcaaaccagctggcagggcgtcgtaacgggtaactctgtggcggaaccgactactttgggtgtccgtgtttccttttgatcctatattggctgcttatggtgacaacgataagttgttatcataaagcttttgggttggccacctggaaaaagttatcagtgtttgatattgttcggctttcacgcctaccaataaaacaagctttatacttacttgttgctttttatcctacaaaggatatcacagagtttcatttacaacttttgctaacgttgtcagca

SEQ ID NO: 24580 - DNA, 705 bp, synthetic construct; identical to SEQ ID NO: 21441
  source 1..705: mol_type = other DNA

SEQ ID NO: 24581 - DNA, 805 bp, synthetic construct; identical to SEQ ID NO: 19806
  source 1..805: mol_type = other DNA

SEQ ID NO: 24582 - DNA, 713 bp, synthetic construct; identical to SEQ ID NO: 19811
  source 1..713: mol_type = other DNA

SEQ ID NO: 24583 - DNA, 803 bp, synthetic construct; identical to SEQ ID NO: 20607
  source 1..803: mol_type = other DNA

SEQ ID NO: 24584 - DNA, 830 bp, synthetic construct
  source 1..830: mol_type = other DNA
atagcctatggggcgctcccacccaagggcccaacgggcgccagtacactggtacgccagtaccctggtattacggtaccattgtacgccagtacctttgtacgcctatttgtacccctcccccatgtaaccttagaagcttaaatatacaatgaccaataggagtccaacacccagttggattgcggtcaagcacttctgtctccccggacctagtagtgataggctgtacccacggccgaagatgaacccgtccgttatccggccagctacttcgagaagcctagtagcatcaaagatctgtcttggcgtttcgctcagcgcattccccccgcgtagatcgggctgatgggtctccgcattccccacgggcgaccgtggcggaggccgcgtggcggcccgcctatggcgaaagccataggacgccatttcagtgacagggtgtgaagagcctattgagctagttggtagtcctccggcccctgaatgcggctaatcctaaccactgagcgtccaccaacaaaccagttgggagggcgtcgtaacgggtaactcggtggcggaaccgactactttgggtgtccgtgtttcctgttgatcctatattggctgcttatggtgacaacgataagttgttatcataaagcttttgggttggccacctggaaaaaattatcagtgtttgatattgttcggctttcacgcctaccaataaaacaagctctttatttgttagttggattttaccctacaagggacattactgagttccatttacaactcttgctcacgctatcagcaagatacctgccctgattaaattgttaaac

SEQ ID NO: 24585 - DNA, 720 bp, synthetic construct; identical to SEQ ID NO: 21392
  source 1..720: mol_type = other DNA

SEQ ID NO: 24586 - DNA, 707 bp, synthetic construct; identical to SEQ ID NO: 21440
  source 1..707: mol_type = other DNA

SEQ ID NO: 24587 - DNA, 842 bp, synthetic construct; identical to SEQ ID NO: 19783
  source 1..842: mol_type = other DNA

SEQ ID NO: 24588 - DNA, 811 bp, synthetic construct; identical to SEQ ID NO: 20537
  source 1..811: mol_type = other DNA

SEQ ID NO: 24589 - DNA, 812 bp, synthetic construct; identical to SEQ ID NO: 20487
  source 1..812: mol_type = other DNA

SEQ ID NO: 24590 - DNA, 802 bp, synthetic construct
  source 1..802: mol_type = other DNA
atagcctatggggcgctcccacccaagggccaatctggcgctagtacactggtacgccagtaccttggtatcacggtaccactgtacgttagtacctttgtatgcctatttgcatcccttcccaaagtaactttagaaacttaaaatacaaagaccaataggagtccaacacccagttggattgcggtcaagcacttctgtttccccggacctagtagtgataggctgtacccacggccgaagatgaacccgtccgttatccggccagctacttcgagaagcctagtagcatcaaagatctgtcttggcgtttcgctcagcgcgttccccccgcgtagatcgggtcgatgggtctccgcatcccccacgggcgaccgtggcggaggccgcgtggcggcccgcctatggcgaaagccataggacgccatttcagtgacagggtgtgaagagcctattgagctagttggtagtcctccggcccctgaatgcggctaatcctaaccacggagcgtccaccagcaaaccagctggcagggcgtcgtaacgggtaactctgtggcggaaccgactactttgggtgtccgtgtttccttttgatcctatgttggctgcttatggtgacaacgataagttgttatcataaagctcttgggttggccacctggaaaaagttatcagtgtttgatattgttcggcttgcacgcctaccaattaaacaagctctatacttgttagtttcattttattcatttgagggtattactcagtttcatctacaacttttgctcacactatcagcaaa

SEQ ID NO: 24591 - DNA, 801 bp, synthetic construct; identical to SEQ ID NO: 20653
  source 1..801: mol_type = other DNA

SEQ ID NO: 24592 - DNA, 800 bp, synthetic construct; identical to SEQ ID NO: 20731
  source 1..800: mol_type = other DNA

SEQ ID NO: 24593 - DNA, 652 bp, synthetic construct; identical to SEQ ID NO: 21435
  source 1..652: mol_type = other DNA

SEQ ID NO: 24594 - DNA, 801 bp, synthetic construct; identical to SEQ ID NO: 20741
  source 1..801: mol_type = other DNA

SEQ ID NO: 24595 - DNA, 796 bp, synthetic construct; identical to SEQ ID NO: 19799
  source 1..796: mol_type = other DNA

SEQ ID NO: 24596 - DNA, 809 bp, synthetic construct; identical to SEQ ID NO: 20529
  source 1..809: mol_type = other DNA

SEQ ID NO: 24597 - DNA, 745 bp, synthetic construct; identical to SEQ ID NO: 19851
  source 1..745: mol_type = other DNA

SEQ ID NO: 24598 - DNA, 825 bp, synthetic construct
  source 1..825: mol_type = other DNA
tttaaaaccagcctgggggttgtacccacccctggggcccacgtggcgccagtactctggtacgctagtacctttgtacgcctgttttcccctcccttaaataaattaagattgccactactgaggggagtagtccgactccgctccggcactgccgcaccagtacaccggtacgctagtacccttgtacggagtagatggtgtccccaccccgaaacttagaagcaagcaaacaaaccgaccaataggcgcgcggcacccagtcgcgtaacggtcaagcacttctgtttccccggtccgcaaggatcgttacccgcccgacccactacgagaagcctagtaactggccaagtgattgcgaggttgcgctcagccacaaccccagtggtagctctggaagatggggctcgcatattcccccgtggtaacacggttgcctgcccgcgtgtgcttccgggttcggccctctgccgttcacctcaatttcatgtaaccagccaagagcctattgtgctgggacggttttcctccggggccgtgaatgctgctaatcccaacctccgagcgtgtgcgcacaaaccagtgttgctacgtcgtaacgcgtaagttggaggcggaacagactactttcggtaccccgtgtttcctttatattttatttactatttttatggtgacaattgctgagatttgcgatctagccgctctgccgttgaatattgcattgtactaccttattgcattccataaaacctcagatattcccagctcttacattgacttgcttgttttcctcaatttaaaatatagattagaaactacaag

SEQ ID NO: 24599 - DNA, 822 bp, synthetic construct
  source 1..822: mol_type = other DNA
tttaaaagagcctgggggttgtacccacccctggggcccacgtggcgctagtactctggtacgttagtacctttgtacgcctgttttcccctcccttaaataaattaagattaccactactgaggggagtagtccgactccgctccggcaacgccgcaccagtacaccggtatgctagtacccttgtacggagtagatggtatccccaccctgaaacttagaagcaagcaaacacaccgaccaataggcgcgcggcatccagtcgcgcaacggtcaagcacctctgtttccccggtccgcaaggatcgttacccgcccgacccactacgagaagcctagtagctggccaaatgattgcgaggttgcgctcagccacaaccccagtggtagctctggaagatggggctcgcacatcccccgtggtaacacggttgcctgcccgcgtgtgcttccgggttcggccttgtgccgttcacctcagtttcatgtaaccagccaagagcctattgtgctgggacggttctcctccggggccgtgaatgctgctaatcccaacctccgagcgtgtgcgcacaaaccagtgttgctacgtcgtaacgcgtaagttggaggcggaacagactactttcggtaccccgtgtttcctttatattttacttattattttatggtgacaattgctgagatttgcgatttagcgactctgcctttgaatattgcactgtattatcttattgcattccataaaacctcaaatattcccagttcctatattgatttattggtttttctcaatttgaaatatagattggataatacgag

SEQ ID NO: 24600 - DNA, 822 bp, synthetic construct; identical to SEQ ID NO: 1277
  source 1..822: mol_type = other DNA

SEQ ID NO: 24601 - DNA, 817 bp, synthetic construct; identical to SEQ ID NO: 1262
  source 1..817: mol_type = other DNA

SEQ ID NO: 24602 - DNA, 822 bp, synthetic construct; identical to SEQ ID NO: 20270
  source 1..822: mol_type = other DNA

SEQ ID NO: 24603 - DNA, 816 bp, synthetic construct; identical to SEQ ID NO: 22250
  source 1..816: mol_type = other DNA

SEQ ID NO: 24604 - DNA, 822 bp, synthetic construct
  source 1..822: mol_type = other DNA
tttaaaagagtcagggggttgtacccacccctggggcccacgtggcgccagtacactggtgtgctagcacctttgtacgcctgtttttccctcccttaaataaatcaagatcaccactactgaggggagtagtccgactccgctccagcaatgctgcaccagtgcactggtacgctagtaccttttcacggagtagatggtgtccccaccccggaacttagaagctttgaaaccaaccgtccaataggcgcgcggtatccagccgtgtaacggacaagcacttctgtctccccggtccgcaaggatcgttacccgcccgacccactgcgagaagcctactaactggccaagtgaccacgaagttgcgctcagccacaaccccagtggtagctctggaagatggggctcgcaatccccccgtggtgacacggttgcctgcccgcgtgtgcttccgggttcggccttgtgccgttcacttcaacgtcacgcaaccagcgaagagcctattgcgctgggacggtactcctccggggccgtgaatgctgctaatcctaacctccgagcgtgtgcgcacaatccagtgttgctacgtcgtaacgcgtaagtcggaggcggaacagactactttcggtaccccgtgtttcctttgttttatacccactgatttatggtgacaattgttgagatttgtgatttggcgaaattaccgttgaatattgccttgtactatctggtttcttttcacaaagcctctagtatccctagctcttacatcgacctgcttgtttttctcaatttaaagtataaattggagaacgcaag

SEQ ID NO: 24605 - DNA, 798 bp, synthetic construct
  source 1..798: mol_type = other DNA
tcccactcccggggcccacgtggcgctagtactctggtacgttagtacctttgtacgcctgttttcccctccttaaataaattaagattaccactactgaggggagtagtccgactccgctccagcactgctgcaccagtgaattggtatgattagtacctcttcacggagtagatggtattcctaccccgcaacttagaagtttatcaacaaaccgaccaataggtgcacagtatccagctgtgtaacggtcaagcacttctgtttccccggtccgccaggatcgttacccgcccgacccactacgagaagcctagtaactagccaagtgaccgcgaagttgcgctcagccacaacccctgtggtagctctggaagatggggctcgcacttcccccgtggtaacacggttgcctgcccgcgtgtgcttctgggttcggccttgtgccgttcacttctacgtcatgtaactagccaagagcctattgtgctgggacggttttcctccggggccgtgaatgctgctaatcctaacctccgagcgtgtgcgcacaatccagtgttgctacgtcgtaacgcgtaagttggaggcggaacagactactttcggtaccccgtgtttccttttattactatattatttaatggtgacaattgcagaaatttgtgatttagcgactttgccattggacatagcattatattgtttaattgcttttcacaaaacgtctgatatacccaactcttatattgatctacttgtctttctttgcttgaagaataaattagagaaagcacg

SEQ ID NO: 24606 - DNA, 539 bp, synthetic construct
  source 1..539: mol_type = other DNA
tttaaaacagcctgggggttgttcccacccctggggcccacgtggcgctagtactctggtacgtcagtacccttgtacgcctgtttttcccccccttaaataaattaagattaccactactgaggggagtagtccgactccgctccagcactgctgcaccagtgaattggtacgttagtacctctgcacggagtagatggtatccccaccccgtaacctagaagcaaagtacacaaccgaccaatagcggcactgcatccagctgtgcaacggtcaagcacttctgtttccccggtccgcaaggatcgttacccgcccaggccactacgagaagcctactaactactgaagcagtcaagaggttgcgctcagccacaatcccagtggtagctctgagtgatggggctcgcgtctcccccgtggtaacacggtcgcttgcccgcgcgtgcactcgggtccggccttcggccgttcacctcgaagctgtgtaagtagccaagagcctattgtgctggtttggttttcctccggagccgtga

SEQ ID NO: 24607 - DNA, 822 bp, synthetic construct; identical to SEQ ID NO: 1281
  source 1..822: mol_type = other DNA

SEQ ID NO: 24608 - DNA, 540 bp, synthetic construct
  source 1..540: mol_type = other DNA
tttaaaacagcctgggggttgttcccacccctggggcccacgcggcgccagtactctggtacgccagtacctttgtacgcctgtttttccctcccttaaataaattaagattaccactactgaggggagtagtccgactccgctccagcactgctgcaccagtgaattggtacgctagtacctctgcacggagtagatggtatccccaccccgcaacttagaagcaaagtacaaacccgaccaatagcggcactgcatccagctgtgcaacggtcaagcacttctgtttccccggtccgcaaggatcgttacccgcccagaccactatgagaagcctattaactactgaaacggcctagaggttgcgctcagccacaaccccagtggtagctctgagtgatggggctcgcaaactcccccgtggtgacacggttgcttgcccgcgtgtgcactcgggttcgacccttcgtcgttcacctcgaagccgcgtaggtagccaagagcctattgtgctggtttggttttcctccggagccgtga

SEQ ID NO: 24609 - DNA, 539 bp, synthetic construct
  source 1..539: mol_type = other DNA
tttaaaacagcctgggggttgttcccacccctggggcccacgcggcgccagtactctggtacgctagtacctttgtacgcctgttttccccctcccttaaataaattaagattgccactactgaggggagtagtccgactccgctccagcactgctgcaccagtggattggtacgctagtacctctacacggagtagatggtatccctgcccagtaacttagaagcaaagcacaaaaccgaccaatagcggcactgcatccagctgtgcgacggtcaagcacttctgtttccccggtccgcaaggatcgttacccgcccggaccaccacgagaagcctattaactactgaaacggcctagaggttgcattcagccacaaccccagtggtagctctgagtgatggggctcgcagttcccccgtggtaacacggttgcttgcccgcgcgtgcactcgggttcggccctaggccgttcacctcgaaaccgcgtaagtagccaagagcctattgtgctggcccggtttcctccggagccgtga

SEQ ID NO: 24610 - DNA, 632 bp, synthetic construct
  source 1..632: mol_type = other DNA
cggagtagatggtatccccaccccgaaacttagaagcaagcaacaaaccgaccaataggcgcgcggcatccagttgcgtatcggtcaagcacttctgtttccccggtccgcaaggatcgttacccgcccgacccactacgagaagcctagtaactggccaagtgaatgcgaggttgcgctcagccacaaccccagtggtagctctggaagatggggctcgcacatcccccgtggtaacacggttgcttgcccgcgcgcgcttccgggttcggccctgtgccgttcacctcaatctcacgtaaccagccaagagcctattgtgctgggacggttctcctccggggccgtgaatgctgctaatcccaacctccgagcgtgtgcgcacaaaccagtgttgctacgtcgtaacgcgtaagttggaggcggaacagactactttcggtaccccgtgtttcctttatttttactcattattttatggtgacaattgctgagatcagtggtttagcgactctaccgttgaacattgcactatattacctcattgcattccatagagcttctgatatccctagttcctatattgatttgcttgtttttcttaacctgaaatataaacttgagagtataaa

SEQ ID NO: 24611 - DNA, 821 bp, synthetic construct
  source 1..821: mol_type = other DNA
tttaaaaccacctgggggttgtacccacccctggggcccacgtggcgccagtactctggttcgtttagaacctttgtacgcctgttttcccctcccttaaacaaattaagattgccactactgaggggagtagtccgactccgctccaacactgttgcaccagtagaccggtatgcgtagtacccttctacggagtagatggcagccccaccccgtaacttagaagtatgaaacaaaatggccaataggggcgcggcagccagtcgcgcagcggtcaagcacttctgtttccccggtcagaaatgatcgttacccgccctacccactacgagaagcctattaactgctgaaagtggcgaagagttgcgctcagccgcaaacccagcggtagctctgagagatggggctcgcattctcccccgtggtgacacggttgcttgcccgcgagtgctctcgggttcgattttcggatcgttcactctaaaccaccgtatgcagccaagagcctattgtgctgggaaggttatcctccggagccgtgaatgctgctaatcccaacctccgagcgtgtgtgcacaaaccagtgttactacgtcgtaacgcgtaagttggaggcggaacagactactttcggtactccgtgtttccttatttttattcatttcaatttatggtgacattgactgatataattgagttagcacgcctaccattgaatattgcactgtattatttgattgcatttaataagagtacagaactcacccttgaattcattgattttgtggttttcctaaactcaattcacaaatctatcaaaa

SEQ ID NO: 24612 - DNA, 821 bp, synthetic construct; identical to SEQ ID NO: 1274
  source 1..821: mol_type = other DNA

SEQ ID NO: 24613 - DNA, 813 bp, synthetic construct
  source 1..813: mol_type = other DNA
tttaaaacagcctgggggttgtacccacccctggggcccacgcggcgctagtactctggttcgcttagaacctttgtacgcctgtttttccctcccttaaataaattaagatctctaccaatgtggggagtagtccgactccgcaccgatacgtcgcaccagcagaccggttcgcttaggacccttctgcggattggtatgagcacccaccccgtaacttagaagcactgaaccaaccgaccaataggtgcgtggcatccagccatgttaaggtcaagcacttctgtttccccggtcagaaatgatcgttatccgccctacccactacgagaagcctactaactactgaaagtgaggaggagttgcgttccgccatgaccccgatggtagctctgagggatggagctcgcagttcccccgtggtaacacggttgcttgctcgcgcgtgccctcgggttcgaccccacggtcgttcactccaagtcaccgtaagtagccaagagcctattgtgctgggaaggttttcctccggagccgtgaatgctgctaatcctaacctccgagcgtgtgcgcacaatccagtgttgctacgtcgtaacgcgtaagttggaggcggaacagactactttcggtactccgtgtttcctttattttattcattcatttatggtgacattatctgagatttgtgaaattgcgaaattgccattgaacattgcactatattacctaatatcattttacaaaacatcagaattaacagttgaactcattgactttcttgttttccttaataagaacaaactcaagaca

SEQ ID NO: 24614 - DNA, 811 bp, synthetic construct; identical to SEQ ID NO: 20650
  source 1..811: mol_type = other DNA

SEQ ID NO: 24615 - DNA, 820 bp, synthetic construct; identical to SEQ ID NO: 20310
  source 1..820: mol_type = other DNA

SEQ ID NO: 24616 - DNA, 820 bp, synthetic construct
  source 1..820: mol_type = other DNA
tttaaaacagcctgggggttgttcccacccccggggcccacgtggcgctagtgctctggttcgtttagaacctttgcacgcctgttttccccccctaaacaaattaagcttgccggtgctgaggggagtagtccgactccgctccactacggtgcaccagtagactggtatcgcggtacctttctacggagttaccggtatccccccacccgtaacttagaagtttgaacacaaatcgaccaatagcggttcggcaaccagtcgggcaacggtcaagcacttctgtttccccggtccgtaaggatcgttacccgccccaactactacgggaagctcagtacctagccaagtttggaagaggttgcgctcagccacaaccccagtggtagctctgagtgatggggctcgcgacaacccccttggtaacaaggacgcttgcccgcgcgtgcactcgggtccaccttatggtgttcaccttgaccaaacgtaactagagaagcgcctactgtgctagttgggttttcctccggggccgtgaatgctgctaatcccaacctccgagcgtgtgcgcacaatccagtgttgctacgtcgtaacgcgtaagttggaggcggaacagactactttcggtaccccgtgtttccttgattttatttattcaatttatggtgacacttgttgaaatttgtgatttagcgaaattaccgctgaatttggcactgtattatttggtcgcctttcacaaaacctctgagatacccgcctcttatattgatcttctggtttacttgaacctgcagtttaaactaaatcaagtaaa

SEQ ID NO: 24617 - DNA, 822 bp, synthetic construct
  source 1..822: mol_type = other DNA
tttaaaaccaacctgggggttgttcccacccctggggcccacgtggcgccagtgctctggtttgttcagaacctttgcacgcctgttttcccttcccttaaacaaattaagcttgccgggactgaggggagtactccgactccgctccactacggtgcaccagtaaactggtatcgcggtacctttttacggagtcaccggcatccccaccctgcaacttagaagtttgaacataaaccgaccaatagaggcccggcatccagtcgagcaacggtcaagcacttctgtttccccggtccgcaaggatcgttacccgccccgactactacgggaagcctagtacctggccaaacttggaaaaggttgcgctcagccacaaccccagtggtagctctgagtgatggggctcgcggcaccccccttggtgacaaggacgcttgcccgcgcgtgcactcgggttcaccctccggtgttcaccttgaccaagcgtaactagagaagcgcctactgtgctagttgggttttcctccggggccgtgaatgctgctaatcccaacctccgagcgtgtgcgcacaatccagtgttgctacgtcgtaacgcgtaagttggaggcggaacagactactttcggtaccccgtgtttcctttattttatttaccaaatttatggtgacaattgttgagatttgtgatttagcgaaattacctttgaatttggcattatactacttggttgcatttcataaaacctcagagatacctgcatcctatatagatctccttgtctatttgaacctacagtgtaaattaaaccaaataaa

SEQ ID NO: 24618 - DNA, 814 bp, synthetic construct
  source 1..814: mol_type = other DNA
tttaaaacagcctgggggttgtacccacccctggggcccacgcggcgctagtactctggttcgcttagaacctttgtacgcctgtttttccctcccttaaacaaattaagatctctgccaatgtggggagtagtccgactccgcaccgatacgtcgcaccagcagaccggttcgcctaggacccttctgcggattggtatgagtaccccccctgtaacttagaagtattgaacaaatcgaccaataggtgcgtggcagccagccatgttacggtcaagcacttctgtttccccggcccgaaagggtcgttacccgcccttcccactacgagaagcctattaactaccgaaggtgacaaggagttgcgctcggccatgaccccgatggtagctctgagggatggagctcgcagttcccccgtggtaacacggttgcttgctcgcgcgtgccctcgggtccagccgaaaggctggtcactccgaatcatcgtacgtagccaagagcccattgtgctgggaaggttctcctccggagccgtgaatgctgctaatcccaacctccgagcgtgtgcgcacaatccagtgttgctacgtcgtaacgcgtaagttggaggcggaacagactactttcggtactccgtgtttccatttattttattattacatttatggtgacactatctgagatttgtgaaattgctaaattgccactgaatattgcactctactacctggtatctttctacaaaacctctgaactcaccattgagcttattgacttcttagtttttctaaataaaaacaggctgaaaacg

SEQ ID NO: 24619 - DNA, 814 bp, synthetic construct
  source 1..814: mol_type = other DNA
tttaaaacaagctgggggttgtacccacccctggggcccacgcggcgccagtactctggttcgattaggacctttgtacgcctgtttttccctcccttaaataaatcaagatctctgccaatgtggggagtagtccgactccgcaccgatacgtcgcaccagcagatcggttcgctcaggacccctctgcggattggtatgagtcccccccccgtaacttagaagttttgaaccaaccgaccaataggcgcgtggtatccagccatgttacggtcaagcacttctgtttccccggtccgaaaggatcgttacccgccctacccactacgagaagcctattaaccgctgaaagtggtacggagttgcgctcagccatgaccccgatggtagctctgagggatggagctcgcagttcccccgtggtaacacggttgcttgctcgcgtgtgccctcgggtccgatcgtaagatcgttcactccaaaccaccgtatgcggccaagagcctattgtgctgggaaggttttcctccggagccgtgaatgctgctaatcctaacctccgagcgtgtgcgcacaacccagtgttgctacgtcgtaacgcgtaagtcgggggcggaacagactactttcggtactccgtgtttcctttaaattttatatttcatttatggtgacactgactgagatttgtgagattgctaaattgccgctcaatatagcactgtactaccttgtgtcattttacaaaacctcagaactcaccgtcgagcttattgacttccttgtctttttaaataaaaacaaactgagaaca

SEQ ID NO: 24620 - DNA, 821 bp, synthetic construct
  source 1..821: mol_type = other DNA
tttaaaacagcctgggggttgtccccacccctggggcccacgtggcgctagtgctctggtttgctcagaacctttgcacgcctgttttcccttccctaaataaattaagcttaccggaactgaggggagtactccgactccgctccactacggtgcaccagtaaactggtatcacggtacctttttacggagttaccggtattcccaccccgtaacttagaagcttgaacacaaaccgaccaatagaggcccggcatccagtcgagcaacggtcaagcacttctgtttccccggtccgtaaggatcgttacccgccccgactactacggaaagcttagtatctagccaagcttggaagaggttgcgctcagccacaaccccagtggtagctctgagtgatggggctcgcgacaacccccttggtaacaagggcgcttgcccgcgcgtgcactcgggttcacctttcggtgttcaccttgaccaagtgtaactagagaagcgcctactgtgctagttgggttttcctccggggccgtgaatgctgctaatcccaacctccgagcgtgtgcgcacaatccagtgttgctacgtcgtaacgcgtaagttggaggcggaacagactactttcggtaccccgtgtttccttgattttacttattaaatttatggtgacaattgctgagatttgtgatttggcaaaattacctttgaacttggcattgtattatttagttgcttttcacaaaacttctgaaattcccgcgtcatacgttgatcttcttgtttatttgaatctccagcataaagttaagtcaagtaag

SEQ ID NO: 24621 - DNA, 821 bp, synthetic construct
  source 1..821: mol_type = other DNA
ttttaaaacccgtgggggttgttcccacccctggggcccacgtggcgctagtgctctggttcgttagaacctttgcacgcctgttttccctcccttaaacaaattaaacttaccggtactgaggggagtagtccggctccgctccactacggtgcaccagtagactggtatcacggtacctttctacggagttaccggtatccctcaccctgtaacttagaagcttgaacatgaatcgaccaatagcggctcggcagccagtcgggcaacggtcaagcacttctgtctccccggtccgcaaggatcgttacccgccctaactactacgggaagcttagtatctagccaagctcggaagaggttgcgttcagccacaaccccagtggtagctctgagtgatggggctcgcgacatcccccttggcaacaaggacgcttgcccgcgcgtgcactcgggttcacctcttggtgttcacctcgaccaagcgtaactagagaagcgcctactgtgctagttgggttttcctccggggccgtgaatgctgctaatcccaacctccgagcgtgtgcgcacaatccagtgttgctacgtcgtaacgcgcaagttggaggcggaacagactactttcggtaccccgtgtttcctttatttgtttatttgatttatggtgacaattgttgagatttgtgatttagcgagattaccacttgaatttggcattgtattatttggttgctttccacaagacttctgatataccccaattcctacattgacctattggtttacttaaatttacaatacaagctgaaccagataaa

SEQ ID NO: 24622 - DNA, 540 bp, synthetic construct
  source 1..540: mol_type = other DNA
tttaaaacagcctgggggttgtacccaccctcggggcccacgtggcgccagtactctggttcgcatagaacctttgtacgcctgttttcccctcccttaaacaaattaagatctctgccaatgtggggagtagtccgactccgcaccgatacgtcgcaccagcagaccggttcgcttaggacccttctgtggattggcatgagcaccccccccgaaacttagaagcacgcgacaaaccgaccaacaggcgcgtggcatccagccatgttacggtcaagcacttctgtttccccggtcagcaatgatcgtcacccgccctacccactacgagaagcctattaactactgaaagtgacaaagagttgcgctcagccatgcccctgatggtagctctgaggaatggagctcgcattccccccgcggtaacgcggttgcttgctcgcgcgtgtcctcgggttcgaccacacggtcgttcactctaagtcatcgtaagtagccaagagcctattgtgctgggaaggttttcctccggagccgtga

SEQ ID NO: 24623 - DNA, 814 bp, synthetic construct
  source 1..814: mol_type = other DNA
tttaaaaccacctgggggttgtacccacccctggggcccacgtggcgccagtacactggttcgcttagaacccttgtacgcctgtttttccttcccttaaacaaattaagatctctgccaatgtggggagtagtccgactccgcaccgatacgtcgcaccagcagaccggttcgcttaggacccttctgcggattggtatgagtccctcacccgtaacttagaagtaatgaacaaactgaccaataggcgcgtggcatccagccatgttacggtcaagcacttctgtctccccggtccaacaggatcgttacccgccctacccactacgagaagcctattaactaccgaaagtgacgaggtgttgcgttcagccgtgaccccgacggtagctctgagggatggagctcgcacctcccccgcggtaacgcggttgcctgctcgcgcgtgccctcgggtccgaccatatggtcgttcacaccaaatcactgtacgtagccaagagcctattgtgctgggaaggttttcctccggagccgtgaatgctgctaatcccaacctccgagcgtgtgcgcacaatccagtgttgctacgtcgtaacgcgtaagtcggaggcggaacagactactttcggtactccgtgtttccttatattttattatttcatttatggtgacattatctgagatttgcgaaattgctaaattgccactgaacattgcactgtactatttagtgtcattttataaaacctcagaactcactgtggaacttattgacttccttgtcttcctcaacaaaaacaaactcagaaat

SEQ ID NO: 24624 - DNA, 821 bp, synthetic construct; identical to SEQ ID NO: 22247
  source 1..821: mol_type = other DNA

SEQ ID NO: 24625 - DNA, 652 bp, synthetic construct; identical to SEQ ID NO: 789
  source 1..652: mol_type = other DNA

SEQ ID NO: 24626 - DNA, 820 bp, synthetic construct
  source 1..820: mol_type = other DNA
tttaaaacagcctgggggttgttcccacccccggggcccatgtggcgctagtgctctggtttgctcagaacctttgcacgcctgttttcccttccctaaacaaattaagcttaccggaactgaggggagtactccgactccgctccactacggtgcaccagtaaactggtatcacggtacctttttacggagttaccggtattcctaccccgtaacttagaagcttgaacacaaaccgaccaatagaggcccggcatccagtcgagcaacggtcaagcacttctgtttccccggtccgcaaggatcgttacccgccctgactactacggacagcttagtatctagccaagcttggaagaggttgcgctcagccacaaccccagtggtagctctgagtgatggggctcgcgataacccccttggtaacaaggacgcttgcccgcgcgcgcactcgggttcacctttcggtgatcaccttgaccaagtgtaactagagaagcgcctactgtgctagttgggttttcctccggggccgtgaatgctgctaatcccaacctccgagcgtgtgcgcacaatccagtgttgctacgtcgtaacgcgcaagttggaggcggaacagactactttcggtaccccgtgtttccttaattttattcattaaatttatggtgacaattgttgagatttgtgatttggcaaagttacctttgaacttggcattgtattacttagttgcttttcacaaaacttctgagattcccgcgttatacgttgatcttcttgtttatttgaatctccagtacaagttaagccaagtaag

SEQ ID NO: 24627 - DNA, 803 bp, synthetic construct
  source 1..803: mol_type = other DNA
ggggttcccacccccggggcccacgtggcgctagtgctctggtccacatagaacccttgcacgcctgtttttccctccctaaacaaattaagcttaccggaactgaggggagtactccgactccgctccactacggtgcaccagtaaactggtatcacggtacctttttacggagttaccggtattccttcaccccgtaacttagaagcacgcacaccaatcgaccaatagcggctcagtacccaactgggcaacggtcaagcacttctgtttccccggtccgtaaggatcgttatccgcccattctgctacgggaggcctagtaactagccaaatttgcgagaggttgcgctcagccacaaccccagtggtagctctgagtgatggggctcgcggttacccccttggtaacaaggacgcttgcccgcgcgtgcactcgggttcacctgatggtgttcacctcaaccaaatgcaactagtgaagagccaactgtgccagtttggtttcctccggggccgtgaatgctgctaatcccaacctccgagcgtgtgcgcacaatccagtgttgctacgtcgtaatgcgtaagttggaggcggaacagactactttcggtaccccgtgtttcctgtattttattactaaatttatggtgacaattgttgagatttgcgaacttgcgaaattaccattgaacttggcattgtattacttggttgcttttcataagacttctgagatacctgcctcttacattgacctcttggtttatctaaatttacagtacaagctcaatcaagtaaa

SEQ ID NO: 24628 - DNA, 818 bp, synthetic construct; identical to SEQ ID NO: 20325
  source 1..818: mol_type = other DNA

SEQ ID NO: 24629 - DNA, 1000 bp, synthetic construct; identical to SEQ ID NO: 17718
  source 1..1000: mol_type = other DNA

SEQ ID NO: 24630 - DNA, 1000 bp, synthetic construct
  source 1..1000: mol_type = other DNA
cgctgtattacggttcccgcccgggacaactggtaccccattaggctacaacatggctgaaaagggtactgggtccccccggattgtgtccgtctgcagtgtgtgtaacgtggtttaccatctccactaacattggactaagcatttcatctttcctccccgattgtgtactcacttggctaacgctgggtggtcgcggttgggtccttgatttactttttctcgtctaagcattccaactgtcctccccgattatgtgctcattcagttaactgctgggtggtcatgactaatatcgaggaaccttctgtccacgcttactttgagctccggtcgcttgacgcttgtagggcgatagggttatcttcctgacaacatctttattctaccttcataggctctatctatgaagacggagtgtggcacccgtcccttctttgggagcttcggtagtgacgccctttgtcactctcgccagccgaggcatgcctggtgccaggtagcaaagaaagcatatgcttaaggacttgattgatttagcgcaagagtttgtagtgatgtccatagtgtctgcggattccccacacggcgacgtgtgccgcggaggccaaaagccacggtgttcacagcacccctatggatgcccacagaccccagtgggcactcttgttgccggactttcaggaaattaggtataggctcttctcaaactcctggcattggactaggtaagaatgccccggaggtaccccagtactccttcgggagtctgggatctgaccgggggccccacaaacatgctttacgtgtttcgtgcggtcaaaaattgtctaactagtcccaaccttgaacaagggattgttctttcctttttattactgagactggcctatggtgacaacagagattgactgtgaatacagttattttctggtgttcatcatctggttttatacagtgctcttatacctttgtggtattcttcaattagataggcaag

SEQ ID NO: 24631 - DNA, 1000 bp, synthetic construct
  source 1..1000: mol_type = other DNA
cactacactacggttcccgcccgggacaactggtaccccattaagccacaacatggctgaaaagggtattgggtccccccggattgtgtccgtttgtagtgtgtgtaacgtggtttaccatctccactaacattggactaagcatttcatctttcctccccgattgtgtactcacttggctaacgctgggtggtcgcggttgggtccttgatttactttttctcgtctaagcattccgactgtcctccccgattatgtgctcattcagttaactgctgggtggtcatgactaatatcgaggaaccttctgtctacgcttactttgagctccggtcgcttgacgcttgtagggcgatagggttatcttcccaacaacatctttattctacctccataggttctatctatggagacggagtgtggcacccgtcccttctttgggagcttcggtagcgacgccctttgtcgctctcgccagccgaggcatgcctggtgccaggtagcaaagaaagcatatgctcaaggacttgactgatttagcgcaagagtttgtagcgatgtccatagtgtctgcggattccccacacggcgacgtgtgccgcggaggccaaaagccacggtgttcacagcacccctatggatgcccacagaccccagtgggcactcttgttgccggactttcaggaaattaggtataggctcttctcaaactcctggcattggactaggtaagaatgccccggaggtaccccagtactccttcgggagtctgggatctgaccgggggccccacaaacatgctttacgtgtttcgtgcggtcaaaaattgtctaactagtcccaaccttgaacaagggattgttctttcctttttattactgagactggcctatggtgacaacagagattgactgtgaatacagttgttttctggtgttcatcatctggttatacacagtgctcttttaactttttggtaactctcagttatacaagcaag

SEQ ID NO: 24632 - DNA, 1000 bp, synthetic construct; identical to SEQ ID NO: 1475
  source 1..1000: mol_type = other DNA

SEQ ID NO: 24633 - DNA, 1000 bp, synthetic construct; identical to SEQ ID NO: 1462
  source 1..1000: mol_type = other DNA

SEQ ID NO: 24634 - DNA, 1000 bp, synthetic construct; identical to SEQ ID NO: 17697
  source 1..1000: mol_type = other DNA

SEQ ID NO: 24635 - DNA, 1000 bp, synthetic construct; identical to SEQ ID NO: 17708
  source 1..1000: mol_type = other DNA

SEQ ID NO: 24636 - DNA, 1000 bp, synthetic construct; identical to SEQ ID NO: 17701
  source 1..1000: mol_type = other DNA

SEQ ID NO: 24637 - DNA, 1000 bp, synthetic construct; identical to SEQ ID NO: 17705
  source 1..1000: mol_type = other DNA

SEQ ID NO: 24638 - DNA, 1000 bp, synthetic construct; identical to SEQ ID NO: 1474
  source 1..1000: mol_type = other DNA

SEQ ID NO: 24639 - DNA, 1000 bp, synthetic construct; identical to SEQ ID NO: 1461
  source 1..1000: mol_type = other DNA

SEQ ID NO: 24640 - DNA, 1000 bp, synthetic construct; identical to SEQ ID NO: 1464
  source 1..1000: mol_type = other DNA

SEQ ID NO: 24641 - DNA, 1000 bp, synthetic construct; identical to SEQ ID NO: 1459
  source 1..1000: mol_type = other DNA

SEQ ID NO: 24642 - DNA, 891 bp, synthetic construct; identical to SEQ ID NO: 17763
  source 1..891: mol_type = other DNA

SEQ ID NO: 24643 - DNA, 1000 bp, synthetic construct; identical to SEQ ID NO: 1469
  source 1..1000: mol_type = other DNA

SEQ ID NO: 24644 - DNA, 977 bp, synthetic construct; identical to SEQ ID NO: 1453
  source 1..977: mol_type = other DNA

SEQ ID NO: 24645 - DNA, 1000 bp, synthetic construct; identical to SEQ ID NO: 1472
  source 1..1000: mol_type = other DNA

SEQ ID NO: 24646 - DNA, 1000 bp, synthetic construct; identical to SEQ ID NO: 1466
  source 1..1000: mol_type = other DNA

SEQ ID NO: 24647 - DNA, 1000 bp, synthetic construct; identical to SEQ ID NO: 17724
  source 1..1000: mol_type = other DNA

SEQ ID NO: 24648 - DNA, 806 bp, synthetic construct; identical to SEQ ID NO: 17785
  source 1..806: mol_type = other DNA

SEQ ID NO: 24649 - DNA, 1000 bp, synthetic construct; identical to SEQ ID NO: 1457
  source 1..1000: mol_type = other DNA

SEQ ID NO: 24650 - DNA, 489 bp, synthetic construct; identical to SEQ ID NO: 514
  source 1..489: mol_type = other DNA

SEQ ID NO: 24651 - DNA, 466 bp, synthetic construct; identical to SEQ ID NO: 502
  source 1..466: mol_type = other DNA

SEQ ID NO: 24652 - DNA, 1000 bp, synthetic construct; identical to SEQ ID NO: 17599
  source 1..1000: mol_type = other DNA

SEQ ID NO: 24653 - DNA, 1000 bp, synthetic construct; identical to SEQ ID NO: 1455
  source 1..1000: mol_type = other DNA

SEQ ID NO: 24654 - DNA, 826 bp, synthetic construct; identical to SEQ ID NO: 2459
  source 1..826: mol_type = other DNA

SEQ ID NO: 24655 - DNA, 700 bp, synthetic construct; identical to SEQ ID NO: 15858
  source 1..700: mol_type = other DNA

SEQ ID NO: 24656 - DNA, 731 bp, synthetic construct; identical to SEQ ID NO: 2347
  source 1..731: mol_type = other DNA

SEQ ID NO: 24657 - DNA, 692 bp, synthetic construct; identical to SEQ ID NO: 2300
  source 1..692: mol_type = other DNA

SEQ ID NO: 24658 - DNA, 619 bp, synthetic construct; identical to SEQ ID NO: 715
  source 1..619: mol_type = other DNA

SEQ ID NO: 24659 - DNA, 597 bp, synthetic construct; identical to SEQ ID NO: 2163
  source 1..597: mol_type = other DNA

SEQ ID NO: 24660 - DNA, 250 bp, synthetic construct; identical to SEQ ID NO: 15888
  source 1..250: mol_type = other DNA

SEQ ID NO: 24661 - DNA, 745 bp, synthetic construct; identical to SEQ ID NO: 19972
  source 1..745: mol_type = other DNA

SEQ ID NO: 24662 - DNA, 743 bp, synthetic construct; identical to SEQ ID NO: 19885
  source 1..743: mol_type = other DNA

SEQ ID NO: 24663 - DNA, 745 bp, synthetic construct; identical to SEQ ID NO: 19975
  source 1..745: mol_type = other DNA

SEQ ID NO: 24664 - DNA, 745 bp, synthetic construct; identical to SEQ ID NO: 19973
  source 1..745: mol_type = other DNA

SEQ ID NO: 24665 - DNA, 744 bp, synthetic construct; identical to SEQ ID NO: 20006
  source 1..744: mol_type = other DNA

SEQ ID NO: 24666 - DNA, 647 bp, synthetic construct; identical to SEQ ID NO: 781
  source 1..647: mol_type = other DNA

SEQ ID NO: 24667 - DNA, 743 bp, synthetic construct; identical to SEQ ID NO: 19993
  source 1..743: mol_type = other DNA

SEQ ID NO: 24668 - DNA, 745 bp, synthetic construct; identical to SEQ ID NO: 19974
  source 1..745: mol_type = other DNA

SEQ ID NO: 24669 - DNA, 558 bp, synthetic construct
  source 1..558: mol_type = other DNA
tctcgtataagctgtacccacggctgaaaacaagtgatccgttatccgcttaggtacttcgagaagcctagtatcaccttgggatcttcgacgcgttgcactcagcactctaacccgagtgtagcttaggctgatgagtctgggcattccccaccggtgacggtggcccaggctgcgttggcggcctacccatggctaatgccatgggacgctagttgtgaacaaggtgtgaagagcccattgagctacctaagagtcctccggcccctgaatgcggctaatcccaaccacggagcaagtgccctcaatccagagggtggcttgtcgtaacgcgcaagtctgtggcggaaccgactactttgggtgtccgtgtttccttttattttcattacggctgcttatggtgacaatcattgattgccatcataaagcaagttggattggccatccggtgaaagttaagtatctcgtccacttaactgttgggcttgctccattaactctactcacgcctgatttaatatctatagtgttattgatttggaaaaagctatcata

SEQ ID NO: 24670 - DNA, 596 bp, synthetic construct; identical to SEQ ID NO: 644
  source 1..596: mol_type = other DNA

SEQ ID NO: 24671 - DNA, 558 bp, synthetic construct
  source 1..558: mol_type = other DNA
tctcgtataggctgtacccacggctgaaaacaagtgacccgttatccgcttaggtacttcgagaagcctagtatcacctcgggatcttcgacgcgttgcactcagcactctaccccgagtgtagcttaggctgatgagcctgggcattccccaccggtgacggtggcccaggctgcgttggcggcctacccatggctaacgccatgggacgctagttgtgaacaaggtgtgaagagcctattgagctacctaagagtcctccggcccctgaatgcggctaatcccaaccacggagcaagtgccctcaatccagagggtggcttgtcgtaacgcgcaagtctgtggcggaaccgactactttgggtgtccgtgtttccttttatttttactatggctgcttatggtgacaatcattgattgccatcataaagcgagttggattggccatccggtgaaagttaagtatctcgtccacttatctgttggatttcctccattaacccaactcacgcctgttttgatatctatagtgttattgatttggaaaaagctatcata

SEQ ID NO: 24672 - DNA, 679 bp, synthetic construct; identical to SEQ ID NO: 818
  source 1..679: mol_type = other DNA

SEQ ID NO: 24673 - DNA, 558 bp, synthetic construct
  source 1..558: mol_type = other DNA
tctcgtataggctgtacccacggctgaaaacaagtgatccgttatccgcttaggtacttcgagaagcctagtatcaccttgggatcttcgacgcgttgcactcagcactctaccccgagtgtagcttaggctgatgagtctgggcattccccaccggtgacggtggcccaggctgcgttggcggcctacccatggctaatgtcatgggacgctagttgtgaacaaggtgtgaagagcctattgagctacctaagagtcctccggcccctgaatgcggctaatcccaaccacggagcaagtgccctcaatccagagggtggcttgtcgtaacgcgtaagtctgtggcggaaccgactactttgggtgtccgtgtttccttttatttttattacggctgcttatggtgacaatcattgattgccatcataaagcgagttggattggccatccggtgaaagttgagtatctcgtccacttatctgtcgggattgctccattaactctattcacgcctgatttgatatctacggtgttattgattcggaaaaagctatcata

SEQ ID NO: 24674 - DNA, 576 bp, synthetic construct; identical to SEQ ID NO: 17629
  source 1..576: mol_type = other DNA

SEQ ID NO: 24675 - DNA, 576 bp, synthetic construct; identical to SEQ ID NO: 17677
  source 1..576: mol_type = other DNA

SEQ ID NO: 24676 - DNA, 576 bp, synthetic construct; identical to SEQ ID NO: 17623
  source 1..576: mol_type = other DNA

SEQ ID NO: 24677 - DNA, 576 bp, synthetic construct; identical to SEQ ID NO: 17627
  source 1..576: mol_type = other DNA

SEQ ID NO: 24678 - DNA, 576 bp, synthetic construct; identical to SEQ ID NO: 17673
  source 1..576: mol_type = other DNA

SEQ ID NO: 24679 - DNA, 576 bp, synthetic construct; identical to SEQ ID NO: 17679
  source 1..576: mol_type = other DNA

SEQ ID NO: 24680 - DNA, 577 bp, synthetic construct; identical to SEQ ID NO: 17662
  source 1..577: mol_type = other DNA

SEQ ID NO: 24681 - DNA, 577 bp, synthetic construct; identical to SEQ ID NO: 17620
  source 1..577: mol_type = other DNA

SEQ ID NO: 24682 - DNA, 576 bp, synthetic construct; identical to SEQ ID NO: 17636
  source 1..576: mol_type = other DNA

SEQ ID NO: 24683 - DNA, 576 bp, synthetic construct; identical to SEQ ID NO: 17634
  source 1..576: mol_type = other DNA

SEQ ID NO: 24684 - DNA, 576 bp, synthetic construct; identical to SEQ ID NO: 17635
  source 1..576: mol_type = other DNA

SEQ ID NO: 24685 - DNA, 576 bp, synthetic construct; identical to SEQ ID NO: 17630
  source 1..576: mol_type = other DNA

SEQ ID NO: 24686 - DNA, 576 bp, synthetic construct; identical to SEQ ID NO: 17680
  source 1..576: mol_type = other DNA

SEQ ID NO: 24687 - DNA, 576 bp, synthetic construct; identical to SEQ ID NO: 17659
  source 1..576: mol_type = other DNA

SEQ ID NO: 24688 - DNA, 577 bp, synthetic construct; identical to SEQ ID NO: 17674
  source 1..577: mol_type = other DNA

SEQ ID NO: 24689 - DNA, 576 bp, synthetic construct; identical to SEQ ID NO: 17628
  source 1..576: mol_type = other DNA

SEQ ID NO: 24690 - DNA, 576 bp, synthetic construct; identical to SEQ ID NO: 17625
  source 1..576: mol_type = other DNA

SEQ ID NO: 24691 - DNA, 576 bp, synthetic construct; identical to SEQ ID NO: 17624
  source 1..576: mol_type = other DNA

SEQ ID NO: 24692 - DNA, 576 bp, synthetic construct; identical to SEQ ID NO: 17645
  source 1..576: mol_type = other DNA

SEQ ID NO: 24693 - DNA, 576 bp, synthetic construct; identical to SEQ ID NO: 17633
  source 1..576: mol_type = other DNA

SEQ ID NO: 24694 - DNA, 576 bp, synthetic construct; identical to SEQ ID NO: 17632
  source 1..576: mol_type = other DNA

SEQ ID NO: 24695 - DNA, 576 bp, synthetic construct; identical to SEQ ID NO: 17642
  source 1..576: mol_type = other DNA

SEQ ID NO: 24696 - DNA, 576 bp, synthetic construct; identical to SEQ ID NO: 17643
  source 1..576: mol_type = other DNA

SEQ ID NO: 24697 - DNA, 576 bp, synthetic construct; identical to SEQ ID NO: 17639
  source 1..576: mol_type = other DNA

SEQ ID NO: 24698 - DNA, 576 bp, synthetic construct; identical to SEQ ID NO: 17637
  source 1..576: mol_type = other DNA

SEQ ID NO: 24699 - DNA, 579 bp, synthetic construct; identical to SEQ ID NO: 632
  source 1..579: mol_type = other DNA

SEQ ID NO: 24700 - DNA, 578 bp, synthetic construct; identical to SEQ ID NO: 630
  source 1..578: mol_type = other DNA

SEQ ID NO: 24701 - DNA, 576 bp, synthetic construct
  source 1..576: mol_type = other DNA
tttgaaaagggggtgggggggcctcggccccctcaccctcttttccggcggccactcgcccgggccaccgttacttcactccactccctcgggactggtttggaggaacataacagggcttcccatccctgttgacccttcactccactcacccttctccttaaccaaccctatccacacccactgattgatccctttggattttgacctcagaatgcctacttgacctcccacttgcctttcccttctcggattgccggtggtgcccggcggaaaaagcacaagtgtgttgcaggctaccaaactcctacccgacaaaggtgcgtgtccgcgtgctgagtaatgggataggagatgcctacaacaggctcgcccatgagtagagcatggactgcggtgcatgtgacttcggtcaccacgggcatagcattgctcacccgtgaatcaagtcatcgagattcctctgacctctgaagtgcactgtggttgcgtggctgggaatccacgcttgaccatgtactgcttgatagagtcgcggctggccgactcatgggttaaagtcagttgacaagacac

SEQ ID NO: 24702 - DNA, 576 bp, synthetic construct; identical to SEQ ID NO: 17626
  source 1..576: mol_type = other DNA

SEQ ID NO: 24703 - DNA, 577 bp, synthetic construct; identical to SEQ ID NO: 17672
  source 1..577: mol_type = other DNA

SEQ ID NO: 24704 - DNA, 577 bp, synthetic construct
  source 1..577: mol_type = other DNA
tttgaaaagggggtgggggggcttcggccctctcaccctcttttccggtggccactcgcccgggccaccgttacttcactccactccctcgggactggtttggaggaacataacagggcttcccacccctgtttacccttaattccacttacccttccccttaaccaaccctatccacaccccactgactgattcctttggattttgacctcagaacgcctacttgacctcccacttgcctctcccttctcggattgccggtggtgcctggcggaaaaagcacaagtgtgttgcagactaccaaactcctacccgacaaaggtgcgtgtccgcgtgctgagtaatgggataggagatgcctacaacaggctcgcccatgagtagagcatggactgcggtgcatgtgactttggtcaccacgggcatagcattgctcacccgtgaatcaagtcatcgagatttctctgacctctgaagtgcactgtggttgcgtggctgggaatccacgcttgaccatgtactgcttgatagagtcgcggctggccgactcatgggttaaagtcagttgacaagactc

SEQ ID NO: 24705 - DNA, 577 bp, synthetic construct
  source 1..577: mol_type = other DNA
tttgaaaagggggtgggggggcttcggccctctcaccctcttttccggtggccactcgcccgggccaccgttacttcactccactccctcgggactggtttggaggaacataacagggcttcccacccctgtttacccttaattccacttacccttccccttaaccaaccctatccacaccccactgactgattcctttggattttgacctcagaacgcctacttgacctcccacttgcctctcccttctcggattgccggtggtgcctggcggaaaaagcacaagtgtgttgcagactaccaaactcctacccgacaaaggtgcgtgtccgcgtgctgagtaatgggataggagatgcctacaacaggctcgcccatgagtagagcatggactgcggtgcatgtgactttggtcaccacgggcatagcattgctcacccgtgaatcaagtcatcgagatttctctgacctctgaagtgcactgtggttgcgtggctgggaatccacgcttgaccatgtactgcttgatagagtcgcggctggccgactcatgggttaaagtcagttgacaagacac

SEQ ID NO: 24706 - DNA, 576 bp, synthetic construct; identical to SEQ ID NO: 17646
  source 1..576: mol_type = other DNA

SEQ ID NO: 24707 - DNA, 576 bp, synthetic construct; identical to SEQ ID NO: 17641
  source 1..576: mol_type = other DNA

SEQ ID NO: 24708 - DNA, 576 bp, synthetic construct; identical to SEQ ID NO: 17640
  source 1..576: mol_type = other DNA

SEQ ID NO: 24709 - DNA, 576 bp, synthetic construct; identical to SEQ ID NO: 17631
  source 1..576: mol_type = other DNA

SEQ ID NO: 24710 - DNA, 577 bp, synthetic construct; identical to SEQ ID NO: 17675
  source 1..577: mol_type = other DNA

SEQ ID NO: 24711 - DNA, 577 bp, synthetic construct; identical to SEQ ID NO: 17678
  source 1..577: mol_type = other DNA

SEQ ID NO: 24712 - DNA, 576 bp, synthetic construct; identical to SEQ ID NO: 17638
  source 1..576: mol_type = other DNA

SEQ ID NO: 24713 - DNA, 569 bp, synthetic construct; identical to SEQ ID NO: 618
  source 1..569: mol_type = other DNA

SEQ ID NO: 24714 - DNA, 577 bp, synthetic construct
  source 1..577: mol_type = other DNA
tttgaaaagggggtgggggggattcggccctctcaccctcttttccggtggccactcgcccgggccaccgttacttcactccactccctcgggactggtttggaggaacataacagggcttcccacccctgtttacccttaattccacttacccttccccttaaccaaccctatccacaccccactgactgattcctttggattttgacctcagaacgcctacttgacctcccacttgcctctcccttctcggattgccggtggtgcctggcggaaaaagcacaagtgtgttgcagactaccaaactcctacccgacaaaggtgcgtgtccgcgtgctgagtaatgggataggagatgcctacaacaggctcgcccatgagtagagcatggactgcggtgcatgtgactttggtcaccacgggcatagcattgctcacccgtgaatcaagtcatcgagatttctctgacctctgaagtgcactgtggttgcgtggctgggaatccacgcttgaccatgtactgcttgatagagtcgcggctggccgactcatgggttaaagtcagttgacaagacac

SEQ ID NO: 24715 - DNA, 576 bp, synthetic construct; identical to SEQ ID NO: 626
  source 1..576: mol_type = other DNA

SEQ ID NO: 24716 - DNA, 574 bp, synthetic construct; identical to SEQ ID NO: 17647
  source 1..574: mol_type = other DNA

SEQ ID NO: 24717 - DNA, 571 bp, synthetic construct; identical to SEQ ID NO: 17681
  source 1..571: mol_type = other DNA

SEQ ID NO: 24718 - DNA, 562 bp, synthetic construct; identical to SEQ ID NO: 17692
  source 1..562: mol_type = other DNA

SEQ ID NO: 24719 - DNA, 570 bp, synthetic construct; identical to SEQ ID NO: 17684
  source 1..570: mol_type = other DNA

SEQ ID NO: 24720 - DNA, 567 bp, synthetic construct; identical to SEQ ID NO: 17651
  source 1..567: mol_type = other DNA

SEQ ID NO: 24721 - DNA, 564 bp, synthetic construct; identical to SEQ ID NO: 17682
  source 1..564: mol_type = other DNA

SEQ ID NO: 24722 - DNA, 563 bp, synthetic construct; identical to SEQ ID NO: 17686
  source 1..563: mol_type = other DNA

SEQ ID NO: 24723 - DNA, 565 bp, synthetic construct; identical to SEQ ID NO: 17689
  source 1..565: mol_type = other DNA

SEQ ID NO: 24724 - DNA, 566 bp, synthetic construct; identical to SEQ ID NO: 17687
  source 1..566: mol_type = other DNA

SEQ ID NO: 24725 - DNA, 563 bp, synthetic construct; identical to SEQ ID NO: 17691
  source 1..563: mol_type = other DNA

SEQ ID NO: 24726 - DNA, 568 bp, synthetic construct; identical to SEQ ID NO: 17685
  source 1..568: mol_type = other DNA

SEQ ID NO: 24727 - DNA, 797 bp, synthetic construct; identical to SEQ ID NO: 1241
  source 1..797: mol_type = other DNA

SEQ ID NO: 24728 - DNA, 560 bp, synthetic construct; identical to SEQ ID NO: 17696
  source 1..560: mol_type = other DNA

SEQ ID NO: 24729 - DNA, 562 bp, synthetic construct; identical to SEQ ID NO: 17714
  source 1..562: mol_type = other DNA

SEQ ID NO: 24730 - DNA, 557 bp, synthetic construct
  source 1..557: mol_type = other DNA
ggcttcggccctctcaccctcttttccggtggccactcgcccgggccaccgttactccactccactccttcgggactggtttggaggaacacaacagggcttcccacccctgtttaccttttatccactcaccttatcccttgaccaaccctatccacaccccactgactgactcctttggattttgacctcagaatgcctacctgacctcccacttgcctctcccttctcggattgccggtggtgcctggcggaaaaagcacaagtgtgttgttggctaccaaactcctacccgacaaaagtgcgtgtccgcgtgctgagtaatgggataggagatgccaacgacaggctcgcccatgagtagagcatggactgcggtgcatgtgacttcggtcaccaggggcatagcattgctcacccctgaatcaagtcatcgagacttctctgacctctgaagtgcactgtggttgcgtggctgggaatccacgcttgaccatgtactgcttgatagagtcgcggctggccgactcatgggttaaagtcagttgacaagacac

SEQ ID NO: 24731 - DNA, 559 bp, synthetic construct; identical to SEQ ID NO: 17699
  source 1..559: mol_type = other DNA

SEQ ID NO: 24732 - DNA, 561 bp, synthetic construct; identical to SEQ ID NO: 17694
  source 1..561: mol_type = other DNA

SEQ ID NO: 24733 - DNA, 558 bp, synthetic construct; identical to SEQ ID NO: 1402
  source 1..558: mol_type = other DNA

SEQ ID NO: 24734 - DNA, 566 bp, synthetic construct; identical to SEQ ID NO: 17688
  source 1..566: mol_type = other DNA

SEQ ID NO: 24735 - DNA, 549 bp, synthetic construct; identical to SEQ ID NO: 1434
  source 1..549: mol_type = other DNA

SEQ ID NO: 24736 - DNA, 561 bp, synthetic construct; identical to SEQ ID NO: 17690
  source 1..561: mol_type = other DNA

SEQ ID NO: 24737 - DNA, 556 bp, synthetic construct; identical to SEQ ID NO: 1423
  source 1..556: mol_type = other DNA

SEQ ID NO: 24738 - DNA, 561 bp, synthetic construct; identical to SEQ ID NO: 17695
  source 1..561: mol_type = other DNA

SEQ ID NO: 24739 - DNA, 546 bp, synthetic construct; identical to SEQ ID NO: 1435
  source 1..546: mol_type = other DNA

SEQ ID NO: 24740 - DNA, 471 bp, synthetic construct; identical to SEQ ID NO: 12
  source 1..471: mol_type = other DNA

SEQ ID NO: 24741 - DNA, 537 bp, synthetic construct; identical to SEQ ID NO: 1442
  source 1..537: mol_type = other DNA

SEQ ID NO: 24742 - DNA, 743 bp, synthetic construct
  source 1..743: mol_type = other DNA
ttgaaaagggggtgggggggcctcggccccctcaccctcttttccggtggtctggtcccggaccaccgttactccattcagcttcttcggaacctgttcggaggaattaaacgggcacccatactccccccaccccccttttgtaactaagtatgtgtgctcgtgatcttgactcccacggaacggaccgatccgttggtgaacaaacagctaggtccacatcctcccttcccctgggagggcccccgccctcccacatcctccccccagcctgacgtatcacaggctgtgtgaagcccccgcgaaagctgctcacgtggcaattgtgggtccccccttcatcaagacaccaggtctttcctccttaaggctagccccggcgtgtgaattcacgttgggcaactagtggtgtcactgtgcgctcccaatctcggccgcggagtgctgttccccaagccaaacccctggcccttcactatgtgcctggcaagcatatctgagaaggtgttccgctgtggctgccaacctggtgacaggtgccccagtgtgcgtaaccttcttccgtctccggacggtagtgattggttaagatttggtgtaaggttcatgtgccaacgccctgtgcgggatgaaacctctactgccctaggaatgccaggcaggtaccccacctccgggtgggatctgagcctgggctaattgtctacgggtagtttcatttccaatccttttatgtcggagtc

SEQ ID NO: 24743 - DNA, 712 bp, synthetic construct; identical to SEQ ID NO: 1348
  source 1..712: mol_type = other DNA

SEQ ID NO: 24744 - DNA, 526 bp, synthetic construct
  source 1..526: mol_type = other DNA
ccacacgcccgggccaccgttactccactccactccttcgggactggtttggaggaacacaacagggcttcccatccctgttttccctcattccactaacccctctcccttaaccaaccccatccaaaccccactgactgattcctttggattttgacctcagaatgcctacttgacctcccacttgcctttccctttccggattgccggtggtgcctggcggaaaaagcacaagtgtgttgatggctaccaaactcctacccgacaaaggtgcgtgtccgcgtgctgagtaatgggataggagatgccattgacaggctcgcccatgagtagagcatggactgcggtgcatgtaacttcggttaccaggggcatagcattgctcacccctgaatcaagtcatcgagatttctctgacctctgaagtgcactgtggttgcgtggctgggaatccacgcttgaccatgtactgcttgatagagtcgcggctggccgactcatgggttaaagtcagttgataagacac

SEQ ID NO: 24745 - DNA, 646 bp, synthetic construct; identical to SEQ ID NO: 1350
  source 1..646: mol_type = other DNA

SEQ ID NO: 24746 - DNA, 420 bp, synthetic construct; identical to SEQ ID NO: 460
  source 1..420: mol_type = other DNA

SEQ ID NO: 24747 - DNA, 712 bp, synthetic construct; identical to SEQ ID NO: 1349
  source 1..712: mol_type = other DNA

SEQ ID NO: 24748 - DNA, 735 bp, synthetic construct; identical to SEQ ID NO: 17608
  source 1..735: mol_type = other DNA

SEQ ID NO: 24749 - DNA, 647 bp, synthetic construct; identical to SEQ ID NO: 1351
  source 1..647: mol_type = other DNA

SEQ ID NO: 24750 - DNA, 372 bp, synthetic construct
  source 1..372: mol_type = other DNA
cagacccctgtgtgaactcacaggtggcaactagtggttccactgcatgctcccgacctcggccgcggagtgctgttccccaagtcgtgacactgaccttcacttatgtgcctggcaagcatatctgagaagatgttccgctgtggctgccaaacctggtaacaggtgccccagtgtgcgtagtcttcttccgtcttcggacggtaagtgttaggtaaagatgcggcgtaaggttcaagtgccaacgccctggaagggatgacccttctactgccctaggaatgccgcgcaggtaccccaggttcgcctgggatctgagcgcgggctaattgtctacgggtagtttcatttccctctttcttaactggcacc

SEQ ID NO: 24751 - DNA, 372 bp, synthetic construct
  source 1..372: mol_type = other DNA
cagacccctgtgtgaactcacaggtggcaactagtggttccactgcatgctcccgacctcggccgcggagtgctgttccccaagtcgtgacactgaccttcacttatgtgcctggcaagcatatctgagaagatgttccgctgtggctgccaaacctggtaacaggtgccccagtgtgcgtagtcttcttccgtcttcggacggtaagtgttaggtaaagatgcggcgtaaggttcaagtgccaacgccctgggagggatgacccttctactgccctaggaatgccgtgcaggtaccccaggttcgcctgggatctgagcgcgggctaattgtctacgggtagtttcatttcccttttctttctatggcatc

SEQ ID NO: 24752 - DNA, 621 bp, synthetic construct
  source 1..621: mol_type = other DNA
cccccccccgcaactcccaagtgtgtgtgcccataatcttgactcctaccggtctgccgcccggtctagtgaacaaacagctaggcaaactccacccctcccctggtggtcggtttcctaccggccgccacaccacccccccagcctgacgtgtcacagactgtgcaaagcccccgcgaaagctgctcacgtggcaattgtgggtcccccctttgtcaaggtgtcgagtctttctccctcaaggctagcccggtgccgtgaactcggcactggcaactagtgacaccactgcacgctcccgacctcggacgcggagtgctgttccccaagtcataacactgacaccaagtcgtgctgcctggcaagcactgcctgggaagatgttccgctgtggttgccaaacctggtaacaggtgccccagtgtgtgtagtcttcctccagtcttcgaactggcggcttcgtgtaaagatgtgatgtaaggttcaagtgccaactccctggaagggatgacccttctactgctctaggaatgctgcgcaggtacccccgttctccggggatctgagcgcaggctaattgtctacgagtagtttcatttctaattcttctttcttggcatc

SEQ ID NO: 24753 - DNA, 717 bp, synthetic construct; identical to SEQ ID NO: 1336
  source 1..717: mol_type = other DNA

SEQ ID NO: 24754 - DNA, 523 bp, synthetic construct; identical to SEQ ID NO: 1337
  source 1..523: mol_type = other DNA

SEQ ID NO: 24755 - DNA, 528 bp, synthetic construct; identical to SEQ ID NO: 1443
  source 1..528: mol_type = other DNA

SEQ ID NO: 24756 - DNA, 534 bp, synthetic construct; identical to SEQ ID NO: 1338
  source 1..534: mol_type = other DNA

SEQ ID NO: 24757 - DNA, 532 bp, synthetic construct; identical to SEQ ID NO: 1444
  source 1..532: mol_type = other DNA

SEQ ID NO: 24758 - DNA, 712 bp, synthetic construct; identical to SEQ ID NO: 866
  source 1..712: mol_type = other DNA

SEQ ID NO: 24759 - DNA, 737 bp, synthetic construct
  source 1..737: mol_type = other DNA
tcttccgatctgggggcctcggccccctcaccctcttttccggtggtccggtcccagaccaccgttactccattcagcttcttcggaacctgttcggaggaattaaatgggcacccactaaccccaacccccttttcgtaactaagtgtgtgcccaatctcttgactcctgctggaaccaccgaccagcagtgtccaaaatgctaggtggaaaacctccccccccctctgggtttcgtgcccagcatcctccccccagcctgacgtgtcacaggctgtgcaaagaccccgcgaaagctgccaaaagtggcaattgtgggtcccccctttgtcaaggcgtcgagtctttctcccttaaggctagccccgtcagtgaactctgttgggcaactagtgacgccactgcatgcctccgacctcggccgcggagtgctgccccccaagtcatgcccctggccacaagttgtgctgcctggcaagcactgtctgtgagaatgttccgctgtggctgccaagcctggtaacaggctgccccagtgtgcgtagttctcatccagacctcggtctggcaacttgctgttaagacatggcgtaaggggcgtgtgccaacgccctggaacgagtgtccactctaataccccgaggaatgctacgcaggtacccctggctcgccagggatctgagcgtaggctaattgtctaagggtattttcatttcccactctctttcttgttcata

SEQ ID NO: 24760 - DNA, 764 bp, synthetic construct
  source 1..764: mol_type = other DNA
cttttccggcggcgcacgttcgcgtcgtcgtaagtctggactcccaaggccaactcggttcaacttcggtttccggacaaatacaaagagcctcagtcttcttggcactttcttacctgagttaacaaagcaagaaacccgcccctctaacgccagacgagcggcgtaaaacttgaacttctggcaacttccactaccctttccctttcccccgcccctactgcgctctcaaggtcgcgcttttctgggactagcccagatctgaaagttcctggcaccctttgccccttcaggcccttatggtaggaactgaccttgtgctgtgatctcggtgcggaagtgctactgcgtagcgattgtaagatccctttgtggttctgccttggcaaggctatagagtactgtgatccgctgcggatgccatcccggtaacgggacccccagtgtgcgcaacagtatgtccacggtcttccgtgttcaccacattcggaacactgctttcgtgaaacagtgtgtgtccaatccctgtgatcagtgtcaaccacaccacctaggaatgctaggaaggtaccccggttcgccgggatctgatcctaggctaattgtctacggtggtgctccttttattttcatctcactttattgactacagctgcttgattctgtgtttgccgctctctctgctctcactgccattctcaagtgttcacactgtccaagctcctttggttgttttcttccacttgccactgtcaactcttgtc

SEQ ID NO: 24761 - DNA, 372 bp, synthetic construct
  source 1..372: mol_type = other DNA
cagacccctgtgtgaattcacaggtggcaactagtggttccactgcatgctcccgacctcggccgcggagtgctgttccccaagtcgtaacactgacctccacttatgtgcctggcaagcatatctgaaaagatgttccgctgtggctgccaaacctggtaacaggtgccccagtgtgcgtagtcttcttccgtcttcggacggtaagtgttaggttaagatgcggcgtaaggttcaagtgccaacgccctggaagggatgtcccttctactgccctaggaatgccgcgcaggtaccccaggttcgcctgggatctgagcgcgggcttattgtctacgggtattttcatttccctttttcttctctggcatc

SEQ ID NO: 24762 - DNA, 561 bp, synthetic construct; identical to SEQ ID NO: 1358
  source 1..561: mol_type = other DNA

SEQ ID NO: 24763 - DNA, 680 bp, synthetic construct
  source 1..680: mol_type = other DNA
tccggtcccagaccaccgttactccattcagcttcttcggaacctgttcggaggaattaaatgggcacccacttcccctcgtaactccccttctaagtgtgtgcccgtaatcttaacccccacgggtctgaccgccccgtggtgaccaaaccgctaggtcgccatcctcccctcccttcccgggatcccgatcccgggacaccctccccccagcccgacgtgtcatgggctgcgtgaagaccccgcgaaagctgccaccgtggcaattgtgggtccccccttcatcaaggtgtcgagtctttctcccttaaggctagacccagtagtgaattctactgggcaactagtgacaccaatgcatgcctccgacctcggccgcggagtgctgccccccaagcggtgaaactgatcgtagactgtgttgcctggcaagcattgtctgagaaggtgttccgctgtggttgccaagcccggtaacgggtgccccagtgtgcgtaaccttcttccggtaaccccggctgtctaccgattaagccatcgtgtaaggggcgtgtgccaacgccctggaacgagtgaaatctctactgccctaggaatgccacgcaggtacccccgattcatcggggatctgagcgtgggctaattgtctaacgggtagtttcatttccctctctttttct

SEQ ID NO: 24764 - DNA, 727 bp, synthetic construct; identical to SEQ ID NO: 1308
  source 1..727: mol_type = other DNA

SEQ ID NO: 24765 - DNA, 624 bp, synthetic construct
  source 1..624: mol_type = other DNA
gtgcaaagtccccgcgaaagctgctcacgtggcaattgtgggtcccccctttgtaaaggaaccgagtctttctcccttaaggctagacccctgtgtgaactcacaggtggcaactagtggttccactgcatgctcccgacctcggccgcggagtgctgttccccaagtcataacactgacctccacttatgtgcctggcaagcatatctgagaagatgttccgctgcggctgccaaacctggtgacaggtgcctcagtgtgcgtagtcttcttccgtccttggacggtaagtgtgtggtaaagatgtggcgtaaggttcaagtgccaacgccctggaagggatgaccctctactgccctaggaatgccgcgcaggtaccccaggtacgcctgggatctgagcgcgggctaactgtctacgggtagtttcatttccctctccttctttactggcattatggcgttctcacaggtttcccgatctgtgcgctctgctgttgctgcctcctccactcaccgaatctatcatacagtcttggactactatgataggctttaccttaattcttatccccaaatgtcttatcccttgccccgtactgaatcctttccttgcccctactgc

SEQ ID NO: 24766 - DNA, 493 bp, synthetic construct; identical to SEQ ID NO: 1355
  source 1..493: mol_type = other DNA

SEQ ID NO: 24767 - DNA, 601 bp, synthetic construct
  source 1..601: mol_type = other DNA
tttaagtgttgtgcccaatctcttgactcctgctggaaccaccgaccagcagtgtccaaaatgctaggtggaaaactctcccttcccctctgggctccacgcccagcatcctccccccagcctgacgtgtcacaggctgtgcaaagaccccgcgaaagctgccaaaagtggcaattgtgggtcccccctttgtcaaggcgtcgagtctttctcccttaaggctagccccgacagtgaattctgtcgggcaactagtgacgccactgcatgcctccgacctcggccgcggagtgctgccccccaagtcatgcccctgaccacaagttgtgctgtctggcaaacactgtctgtgagaatgttccgctgtggctgccaagcctggcaacaggctgccccagtgtgtgtagttctcatccagacttcggtctggcaacttgctgttaagacatggcgtaaggggcgtgtgccaacgccctggaacgagtgtccactctaataccccgaggaatgctacgcaggtacccctggcttaccagggatctgagcgtaggctaattgtctaagggtattttcatttcccactctctctttcttgttcata

SEQ ID NO: 24768 - DNA, 438 bp, synthetic construct; identical to SEQ ID NO: 1323
  source 1..438: mol_type = other DNA

SEQ ID NO: 24769 - DNA, 679 bp, synthetic construct; identical to SEQ ID NO: 1307
  source 1..679: mol_type = other DNA

SEQ ID NO: 24770 - DNA, 487 bp, synthetic construct; identical to SEQ ID NO: 1318
  source 1..487: mol_type = other DNA

SEQ ID NO: 24771 - DNA, 710 bp, synthetic construct; identical to SEQ ID NO: 1310
  source 1..710: mol_type = other DNA

SEQ ID NO: 24772 - DNA, 306 bp, synthetic construct; identical to SEQ ID NO: 1339
  source 1..306: mol_type = other DNA

SEQ ID NO: 24773 - DNA, 710 bp, synthetic construct; identical to SEQ ID NO: 1311
  source 1..710: mol_type = other DNA

SEQ ID NO: 24774 - DNA, 710 bp, synthetic construct; identical to SEQ ID NO: 1309
  source 1..710: mol_type = other DNA

SEQ ID NO: 24775 - DNA, 947 bp, synthetic construct
  source 1..947: mol_type = other DNA
ccggaccaccgtcacaccttttagctacttcggtacctacttaggtggaattaaacgggcacccactccaactcccctctctccctcgtaactgaagtgttgtgcccataatcttgactcctgcgggtgttgtcgccccgtacagtgaacaaacagctagacaaaccctccccaccctgacggcaggtgcttcaccgccctgccgcccttcctccccccagcatgacgtgtctcatgctgtgcagagcccccgcggaagctgccaccgtggcaactgtggggcccccctctgtcaagtcaccgaggctttctcccttaaggctagaccggttgcacgaagctgtaactggcaactagtggtgacactgcacgccttcgacctcggccgcggagtgctgttccccaacctgtaacactgatcccaagctgtgctgcctggcaagcatagtctgcatggacgttccgctgcgtcagccaaacctggtgacaggtgacccagtgtgcgtagtccatgtccggatttcggtccggcagtttgcggataaagatgcagggtaaggttcaagtgccaacgccctggaaggagtgacccttctactgccctaggaatgccgcgcaggtaccccagtcccttggaactgggatctgagcgcgggctaattgtctacgggtagtttcatctcctcaaaataagaagtggcatcatggcgacaacacaggaatcacgtcttgtgcggtcaaaagtgttccactctcaaacccaccgcgtctaccatacagtcctggactgttatgataggctctacctcaagtcctaccctcaattggcctacccgctaccaaaaacaaaagtcttcccctgctacctctgcatgcatgatgaagaacattccctcctctctcctgaatcactctgtggtgaaggagctgaaatctgctggaaatgc

SEQ ID NO: 24776 - DNA, 438 bp, synthetic construct; identical to SEQ ID NO: 1328
  source 1..438: mol_type = other DNA

SEQ ID NO: 24777 - DNA, 438 bp, synthetic construct; identical to SEQ ID NO: 1327
  source 1..438: mol_type = other DNA

SEQ ID NO: 24778 - DNA, 712 bp, synthetic construct; identical to SEQ ID NO: 1305
  source 1..712: mol_type = other DNA

SEQ ID NO: 24779 - DNA, 438 bp, synthetic construct; identical to SEQ ID NO: 1321
  source 1..438: mol_type = other DNA

SEQ ID NO: 24780 - DNA, 438 bp, synthetic construct; identical to SEQ ID NO: 1325
  source 1..438: mol_type = other DNA

SEQ ID NO: 24781 - DNA, 438 bp, synthetic construct; identical to SEQ ID NO: 1324
  source 1..438: mol_type = other DNA

SEQ ID NO: 24782 - DNA, 438 bp, synthetic construct; identical to SEQ ID NO: 1326
  source 1..438: mol_type = other DNA

SEQ ID NO: 24783 - DNA, 664 bp, synthetic construct; identical to SEQ ID NO: 1316
  source 1..664: mol_type = other DNA

SEQ ID NO: 24784 - DNA, 677 bp, synthetic construct; identical to SEQ ID NO: 1312
  source 1..677: mol_type = other DNA

SEQ ID NO: 24785 - DNA, 301 bp, synthetic construct; identical to SEQ ID NO: 1340
  source 1..301: mol_type = other DNA

SEQ ID NO: 24786 - DNA, 395 bp, synthetic construct; identical to SEQ ID NO: 431
  source 1..395: mol_type = other DNA

SEQ ID NO: 24787 - DNA, 509 bp, synthetic construct; identical to SEQ ID NO: 1448
  source 1..509: mol_type = other DNA

SEQ ID NO: 24788 - DNA, 438 bp, synthetic construct; identical to SEQ ID NO: 1331
  source 1..438: mol_type = other DNA

SEQ ID NO: 24789 - DNA, 438 bp, synthetic construct; identical to SEQ ID NO: 1329
  source 1..438: mol_type = other DNA

SEQ ID NO: 24790 - DNA, 438 bp, synthetic construct; identical to SEQ ID NO: 1322
  source 1..438: mol_type = other DNA

SEQ ID NO: 24791 - DNA, 677 bp, synthetic construct; identical to SEQ ID NO: 1314
  source 1..677: mol_type = other DNA

SEQ ID NO: 24792 - DNA, 712 bp, synthetic construct; identical to SEQ ID NO: 1306
  source 1..712: mol_type = other DNA

SEQ ID NO: 24793 - DNA, 720 bp, synthetic construct; identical to SEQ ID NO: 1361
  source 1..720: mol_type = other DNA

SEQ ID NO: 24794 - DNA, 724 bp, synthetic construct; identical to SEQ ID NO: 1362
  source 1..724: mol_type = other DNA

SEQ ID NO: 24795 - DNA, 731 bp, synthetic construct; identical to SEQ ID NO: 931
  source 1..731: mol_type = other DNA

SEQ ID NO: 24796 - DNA, 641 bp, synthetic construct; identical to SEQ ID NO: 770
  source 1..641: mol_type = other DNA

SEQ ID NO: 24797 - DNA, 708 bp, synthetic construct; identical to SEQ ID NO: 1365
  source 1..708: mol_type = other DNA

SEQ ID NO: 24798 - DNA, 951 bp, synthetic construct
  source 1..951: mol_type = other DNA
tggacccggaccaccgtcacaccttttagctacttcggtacctacttaggtggaattaaacgggcacccactccaatccctctctccccttgtaactgaagtgttgtgcccataatcttgactcctgcgggtgttgtcgccccgtacagtgaacaaacagctagacaaactcctcccctccctgacggcaggtgctcaccgccctgccgcctttcctccccccagcatgacgtgtctcatgctgtgcagagcccccgcggaagctgccaccgtggcaactgtggggcccccctctgtcaagtcaccgaggctttctcccttaaggctagtccggttacacgaagctgtaactggcaactagtggtgacactgcacgccttcgacctcggccgcggagtgctgttccccaacctgtaacactgatcccaagctgtgctgcctggcaagcatagtctgcatggacgttccgctgcgtcagccaaacctggtaacaggtgacccagtgtgcgtagtccatgtccggatttcggtccggcagtttgtggataaagatgcagggtaaggttcaagtgccaacgccctggaaggagtgacccttctactgccctaggaatgccgcgcaggtaccccagttcttcggaattgggatctgagcgcgggctaattgtctacgggtagtttcatctcctcaaaacaagaagtggcatcatggcgacaacacaggaatcacgtcttgtgcggtcaaaagtgttccactctcaaacccaccgcgtctaccatacagtcctcgactgctatgataggctctacctcaagtcctaccctcaattggcttaccccctaccaaaaacaaaggtctttccctgctacctctgcatgcatgatgaagaacactcccttctctctcctgaatcactctgtggtgaaggagctgaaatctgctggaaatgc

SEQ ID NO: 24799 - DNA, 677 bp, synthetic construct; identical to SEQ ID NO: 1315
  source 1..677: mol_type = other DNA

SEQ ID NO: 24800 - DNA, 438 bp, synthetic construct; identical to SEQ ID NO: 1319
  source 1..438: mol_type = other DNA

SEQ ID NO: 24801 - DNA, 484 bp, synthetic construct; identical to SEQ ID NO: 1366
  source 1..484: mol_type = other DNA

SEQ ID NO: 24802 - DNA, 699 bp, synthetic construct; identical to SEQ ID NO: 1359
  source 1..699: mol_type = other DNA

SEQ ID NO: 24803 - DNA, 718 bp, synthetic construct; identical to SEQ ID NO: 1367
  source 1..718: mol_type = other DNA

SEQ ID NO: 24804 - DNA, 679 bp, synthetic construct; identical to SEQ ID NO: 89
  source 1..679: mol_type = other DNA

SEQ ID NO: 24805 - DNA, 555 bp, synthetic construct; identical to SEQ ID NO: 2119
  source 1..555: mol_type = other DNA

SEQ ID NO: 24806 - DNA, 496 bp, synthetic construct; identical to SEQ ID NO: 523
  source 1..496: mol_type = other DNA

SEQ ID NO: 24807 - DNA, 745 bp, synthetic construct; identical to SEQ ID NO: 19853
  source 1..745: mol_type = other DNA

SEQ ID NO: 24808 - DNA, 622 bp, synthetic construct
  source 1..622: mol_type = other DNA
aaacagcggacgggttccctaccatccgacccactgggtgtagtgctctggtattttgtacctttgcacgcctgtttcccctttgtacccacccttaatttcctccctctgtaacgttagaagtttgtgaaattaaaagtacaataggaagcatcacatccagtggtgtttagtacaagcactcctgtttccccggagcgaggtataggttgtacccacgaccgaaagcctttaaccgttatccgccaatcaactacgtaacggctagtaccatcatgtttttgatttggtgttcgatcaggtggttccccccactagtctggtcgatgaggctaggaattccccacgggtaaccgtgtcctagcctgcgtggcggccagcccagcttatgctgggacgccttttctaagacatggtgtgaagacccgcatgtgcttgattgtgagtcctccggcccctgaatgcggctaaccctaaccccggagcccagcagcataatccaatgttgtttgggtcgtaatgagcaattctgggatgggaccgactactttgggtgtccgtgtttccttttattcttatattgtttcatggtcacagcatatatattacatatactgtgatc

SEQ ID NO: 24809 - DNA, 590 bp, synthetic construct; identical to SEQ ID NO: 21617
  source 1..590: mol_type = other DNA

SEQ ID NO: 24810 - DNA, 614 bp, synthetic construct; identical to SEQ ID NO: 21439
  source 1..614: mol_type = other DNA

SEQ ID NO: 24811 - DNA, 508 bp, synthetic construct
  source 1..508: mol_type = other DNA
cgttagaagtttgtgaaattaaaagtacaataggaagcatcacatccagtggtgtttagtacaagcactcctgtttccccggagcgaggtataggttgtacccacgaccgaaagcctttaaccgttatccgccaatcaactacgtaacggctagtaccatcatgtttttgatttggtgttcgatcaggtggttccccccactagtctggtcgatgaggctaggaattccccacgggtgaccgtgtcctagcctgcgtggcggccagcccagcttatgctgggacgccttttcaaagacatggtgtgaagacccgcatgtgcttgattgtgagtcctccggcccctgaatgcggctaaccctaaccccggagcccagcagcataatccaatgttgtttgggtcgtaatgagcaattctgggatgggaccgactactttgggtgtccgtgtttccttttattcttatattgtttcatggtcacagcatatatattacatatactgtgatc

SEQ ID NO: 24812 - DNA, 576 bp, synthetic construct; identical to SEQ ID NO: 21473
  source 1..576: mol_type = other DNA

SEQ ID NO: 24813 - DNA, 617 bp, synthetic construct
  source 1..617: mol_type = other DNA
cggatgggtatcccaccatccgacccacagggtgtagtgctctggtattttgtacctttgcacgcctgttttcccattgtacccctccttaaattcctccccaagtaacgttagaagtttaaggaaaccaatgtacaataggaagcatcacatccagtggtgtaatgtacaagcacttctgtttccccggagcgaggtataagtggtacccaccgctgaaagcctttaaccgttatccgccaatcaactacgtaatggctagtattatcatgtttgtaatctggcgttcgatcaggtggttccccccactagtttggtcgatgaggctaggaactccccacgggcgaccgtgtcctagcctgcgtggcggccaacccagctcttgctgggacgcctttttatagacatggtgtgaagacctgcatgtgcttgattgtgagtcctccggcccctgaatgcggctaaccttaaccccggagccttgcagcataatccaatgttgttgaggtcgtaatgagtaattctgggacgggaccgactactttgggtgtccgtgtttccttttattctttatattgtcttatggtcacagcatatatagtatatatactgtgatc

SEQ ID NO: 24814 - DNA, 604 bp, synthetic construct; identical to SEQ ID NO: 21588
  source 1..604: mol_type = other DNA

SEQ ID NO: 24815 - DNA, 551 bp, synthetic construct
  source 1..551: mol_type = other DNA
gttttccctttgtacccgcccttaacttcctccctctgtaacgttagaagtttgtgaaattaaaggtacaataggaagcatcacatccagtggtgtttagtacaagcactcctgtctccccggagcgaggtataggttgtacccacgaccaaaagcctttaaccgttatccgccaatcaactacgtaacggctagtatcatcatgtttttgacttggtgttcgatcaggtggttccccccactagtctggtcgatgaggctaggaactcctcacgggtaaccgtgtcctagcctgcgtggcggccagcccagcttatgctgggacgcctttttaaagacatggtgtgaagacccgcatgtgcttgattgtgagtcctccggcccctgaatgcggctaaccctaaccccggagcccagcaacataatccaatgttgtttgggtcgtaatgagcaattctgggatgggaccgactactttgggtgtccgtgtttccttttattcttatattgtttcatggtcacagcatatatattacatatatactgtgatc

SEQ ID NO: 24816 - DNA, 586 bp, synthetic construct
  source 1..586: mol_type = other DNA
gtgtagtgctctggtattttgtacccttgcacgcctgtttcccatttgtacccttccttgatttcctacccctgtaacattagaagttttggaattttacagtacaataggaagcgccacatccagtggtgttgtgtacaagcacttctgtttacccggagcgaggtataggttgtacccacggccaaaaacctttaaccgttatccgccaaccaactacgtaacggctagtatcatcttgtacttgacttggtgttcgatcaggtggtatcccccactagtctggtcgatgaggctaggaattccccacgggcgaccgtgtcctagcctgcgtggcggccagcccagctttagctgggacgccttttcaaagacatggtgtgaagacctgcatgtgcttggttgtgagtcctccggcccctgaatgcggctaaccttaaccccggagcccagtgatataatccaatgttatttgggtcgtaatgagtaattccgggatgggaccgactactttgggtgtccgtgtttccttttattctttatattgtcttatggtcacagcatatatagtatatatactgtgatc

SEQ ID NO: 24817 - DNA, 626 bp, synthetic construct; identical to SEQ ID NO: 21468
  source 1..626: mol_type = other DNA

SEQ ID NO: 24818 - DNA, 743 bp, synthetic construct; identical to SEQ ID NO: 20110
  source 1..743: mol_type = other DNA

SEQ ID NO: 24819 - DNA, 742 bp, synthetic construct; identical to SEQ ID NO: 20307
  source 1..742: mol_type = other DNA

SEQ ID NO: 24820 - DNA, 725 bp, synthetic construct; identical to SEQ ID NO: 20660
  source 1..725: mol_type = other DNA

SEQ ID NO: 24821 - DNA, 677 bp, synthetic construct
  source 1..677: mol_type = other DNA
ggcgtagtactctggtatcacggtacctttgtacgcctattttactccccttccccccgtaacttagaagcattaactacaagttcaatagtaggactaccaaccaggtagttcaccgaacaagcacttctgtttacccggtcctagtacctgtgaagctgttcccacggcggaaggggaaaaagatcgttacccggctacctacttcgagaagcctagtaatgtcattgaaactcttgagcgttgcgttcagcacagtaccccctgtgtagctttggctgatgagtctgggcattccccactggcgacagtggcccaggctgcgttggcggccaaccggtccgggcaaccgggtcggacgcttatttgtggacatggtgtgaagagcctattgagctaggtagtagtcctccggcccctgaatgcggctaatcctaactccggagcaagtgcgcgcaatccagcgtgtaacttgtcgtaacgcgtaagtctggagcggaaccgactactttgggtgtccgtgtttcctgttttaccttatttggctgcttatggtgacaatctagtgttgttaccatatagcaattggattggccatccggtgaatttcttttgtgacgtttcttttgcggtatttataccaaactacacgtgtattatcagtttcaacttgtatc

SEQ ID NO: 24822 - DNA, 549 bp, synthetic construct; identical to SEQ ID NO: 4016
  source 1..549: mol_type = other DNA

SEQ ID NO: 24823 - DNA, 549 bp, synthetic construct; identical to SEQ ID NO: 2984
  source 1..549: mol_type = other DNA

SEQ ID NO: 24824 - DNA, 549 bp, synthetic construct; identical to SEQ ID NO: 4016
  source 1..549: mol_type = other DNA

SEQ ID NO: 24825 - DNA, 549 bp, synthetic construct; identical to SEQ ID NO: 2984
  source 1..549: mol_type = other DNA

SEQ ID NO: 24826 - DNA, 549 bp, synthetic construct; identical to SEQ ID NO: 4016
  source 1..549: mol_type = other DNA

SEQ ID NO: 24827 - DNA, 549 bp, synthetic construct; identical to SEQ ID NO: 2984
  source 1..549: mol_type = other DNA

SEQ ID NO: 24828 - DNA, 549 bp, synthetic construct; identical to SEQ ID NO: 4016
  source 1..549: mol_type = other DNA

SEQ ID NO: 24829 - DNA, 549 bp, synthetic construct; identical to SEQ ID NO: 2984
  source 1..549: mol_type = other DNA

SEQ ID NO: 24830 - DNA, 549 bp, synthetic construct; identical to SEQ ID NO: 4016
  source 1..549: mol_type = other DNA

SEQ ID NO: 24831 - DNA, 549 bp, synthetic construct; identical to SEQ ID NO: 2984
  source 1..549: mol_type = other DNA

SEQ ID NO: 24832 - DNA, 549 bp, synthetic construct; identical to SEQ ID NO: 4016
  source 1..549: mol_type = other DNA

SEQ ID NO: 24833 - DNA, 549 bp, synthetic construct; identical to SEQ ID NO: 2984
  source 1..549: mol_type = other DNA

SEQ ID NO: 24834 - DNA, 549 bp, synthetic construct; identical to SEQ ID NO: 4016
  source 1..549: mol_type = other DNA

SEQ ID NO: 24835 - DNA, 549 bp, synthetic construct; identical to SEQ ID NO: 2984
  source 1..549: mol_type = other DNA

SEQ ID NO: 24836 - DNA, 549 bp, synthetic construct; identical to SEQ ID NO: 4016
  source 1..549: mol_type = other DNA

SEQ ID NO: 24837 - DNA, 549 bp, synthetic construct; identical to SEQ ID NO: 2984
  source 1..549: mol_type = other DNA

SEQ ID NO: 24838 - DNA, 592 bp, synthetic construct; identical to SEQ ID NO: 31
  source 1..592: mol_type = other DNA

SEQ ID NO: 24839 - DNA, 612 bp, synthetic construct; identical to SEQ ID NO: 49
  source 1..612: mol_type = other DNA

SEQ ID NO: 24840 - DNA, 613 bp, synthetic construct; identical to SEQ ID NO: 50
  source 1..613: mol_type = other DNA

SEQ ID NO: 24841 - DNA, 613 bp, synthetic construct; identical to SEQ ID NO: 51
  source 1..613: mol_type = other DNA

SEQ ID NO: 24842 - DNA, 614 bp, synthetic construct; identical to SEQ ID NO: 55
  source 1..614: mol_type = other DNA

SEQ ID NO: 24843 - DNA, 621 bp, synthetic construct; identical to SEQ ID NO: 62
  source 1..621: mol_type = other DNA

SEQ ID NO: 24844 - DNA, 637 bp, synthetic construct; identical to SEQ ID NO: 70
  source 1..637: mol_type = other DNA

SEQ ID NO: 24845 - DNA, 647 bp, synthetic construct; identical to SEQ ID NO: 74
  source 1..647: mol_type = other DNA

SEQ ID NO: 24846 - DNA, 649 bp, synthetic construct; identical to SEQ ID NO: 76
  source 1..649: mol_type = other DNA

SEQ ID NO: 24847 - DNA, 651 bp, synthetic construct; identical to SEQ ID NO: 77
  source 1..651: mol_type = other DNA

SEQ ID NO: 24848 - DNA, 680 bp, synthetic construct; identical to SEQ ID NO: 90
  source 1..680: mol_type = other DNA

SEQ ID NO: 24849 - DNA, 697 bp, synthetic construct; identical to SEQ ID NO: 98
  source 1..697: mol_type = other DNA

SEQ ID NO: 24850 - DNA, 702 bp, synthetic construct; identical to SEQ ID NO: 100
  source 1..702: mol_type = other DNA

SEQ ID NO: 24851 - DNA, 705 bp, synthetic construct; identical to SEQ ID NO: 101
  source 1..705: mol_type = other DNA

SEQ ID NO: 24852 - DNA, 708 bp, synthetic construct; identical to SEQ ID NO: 106
  source 1..708: mol_type = other DNA

SEQ ID NO: 24853 - DNA, 708 bp, synthetic construct; identical to SEQ ID NO: 107
  source 1..708: mol_type = other DNA

SEQ ID NO: 24854 - DNA, 709 bp, synthetic construct; identical to SEQ ID NO: 108
  source 1..709: mol_type = other DNA

SEQ ID NO: 24855 - DNA, 709 bp, synthetic construct; identical to SEQ ID NO: 109
  source 1..709: mol_type = other DNA

SEQ ID NO: 24856 - DNA, 709 bp, synthetic construct; identical to SEQ ID NO: 112
  source 1..709: mol_type = other DNA

SEQ ID NO: 24857 - DNA, 743 bp, synthetic construct; identical to SEQ ID NO: 119
  source 1..743: mol_type = other DNA

SEQ ID NO: 24858 - DNA, 743 bp, synthetic construct; identical to SEQ ID NO: 120
  source 1..743: mol_type = other DNA

SEQ ID NO: 24859 - DNA, 744 bp, synthetic construct; identical to SEQ ID NO: 121
  source 1..744: mol_type = other DNA

SEQ ID NO: 24860 - DNA, 744 bp, synthetic construct; identical to SEQ ID NO: 122
  source 1..744: mol_type = other DNA

SEQ ID NO: 24861 - DNA, 746 bp, synthetic construct; identical to SEQ ID NO: 124
  source 1..746: mol_type = other DNA

SEQ ID NO: 24862 - DNA, 748 bp, synthetic construct; identical to SEQ ID NO: 125
  source 1..748: mol_type = other DNA

SEQ ID NO: 24863 - DNA, 751 bp, synthetic construct; identical to SEQ ID NO: 127
  source 1..751: mol_type = other DNA

SEQ ID NO: 24864 - DNA, 1000 bp, synthetic construct; identical to SEQ ID NO: 137
  source 1..1000: mol_type = other DNA

SEQ ID NO: 24865 - DNA, 1000 bp, synthetic construct; identical to SEQ ID NO: 138
  source 1..1000: mol_type = other DNA

SEQ ID NO: 24866 - DNA, 512 bp, synthetic construct; identical to SEQ ID NO: 535
  source 1..512: mol_type = other DNA

SEQ ID NO: 24867 - DNA, 512 bp, synthetic construct; identical to SEQ ID NO: 536
  source 1..512: mol_type = other DNA

SEQ ID NO: 24868 - DNA, 529 bp, synthetic construct; identical to SEQ ID NO: 559
  source 1..529: mol_type = other DNA

SEQ ID NO: 24869 - DNA, 535 bp, synthetic construct; identical to SEQ ID NO: 574
  source 1..535: mol_type = other DNA

SEQ ID NO: 24870 - DNA, 541 bp, synthetic construct; identical to SEQ ID NO: 580
  source 1..541: mol_type = other DNA

SEQ ID NO: 24871 - DNA, 541 bp, synthetic construct; identical to SEQ ID NO: 581
  source 1..541: mol_type = other DNA

SEQ ID NO: 24872 - DNA, 542 bp, synthetic construct; identical to SEQ ID NO: 583
  source 1..542: mol_type = other DNA

SEQ ID NO: 24873 - DNA, 553 bp, synthetic construct; identical to SEQ ID NO: 597
  source 1..553: mol_type = other DNA

SEQ ID NO: 24874 - DNA, 584 bp, synthetic construct; identical to SEQ ID NO: 636
  source 1..584: mol_type = other DNA

SEQ ID NO: 24875 - DNA, 596 bp, synthetic construct; identical to SEQ ID NO: 645
  source 1..596: mol_type = other DNA

SEQ ID NO: 24876 - DNA, 598 bp, synthetic construct; identical to SEQ ID NO: 648
  source 1..598: mol_type = other DNA

SEQ ID NO: 24877 - DNA, 602 bp, synthetic construct; identical to SEQ ID NO: 653
  source 1..602: mol_type = other DNA

SEQ ID NO: 24878 - DNA, 603 bp, synthetic construct; identical to SEQ ID NO: 654
  source 1..603: mol_type = other DNA

SEQ ID NO: 24879 - DNA, 605 bp, synthetic construct; identical to SEQ ID NO: 657
  source 1..605: mol_type = other DNA

SEQ ID NO: 24880 - DNA, 610 bp, synthetic construct; identical to SEQ ID NO: 665
  source 1..610: mol_type = other DNA

SEQ ID NO: 24881 - DNA, 612 bp, synthetic construct; identical to SEQ ID NO: 680
  source 1..612: mol_type = other DNA

SEQ ID NO: 24882 - DNA, 612 bp, synthetic construct; identical to SEQ ID NO: 684
  source 1..612: mol_type = other DNA

SEQ ID NO: 24883 - DNA, 612 bp, synthetic construct; identical to SEQ ID NO: 686
  source 1..612: mol_type = other DNA

SEQ ID NO: 24884 - DNA, 614 bp, synthetic construct; identical to SEQ ID NO: 690
  source 1..614: mol_type = other DNA

SEQ ID NO: 24885 - DNA, 614 bp, synthetic construct; identical to SEQ ID NO: 691
  source 1..614: mol_type = other DNA

SEQ ID NO: 24886 - DNA, 614 bp, synthetic construct; identical to SEQ ID NO: 692
  source 1..614: mol_type = other DNA

SEQ ID NO: 24887 - DNA, 615 bp, synthetic construct; identical to SEQ ID NO: 693
  source 1..615: mol_type = other DNA

SEQ ID NO: 24888 - DNA, 615 bp, synthetic construct; identical to SEQ ID NO: 695
  source 1..615: mol_type = other DNA

SEQ ID NO: 24889 - DNA, 615 bp, synthetic construct; identical to SEQ ID NO: 697
  source 1..615: mol_type = other DNA

SEQ ID NO: 24890 - DNA, 615 bp, synthetic construct; identical to SEQ ID NO: 699
  source 1..615: mol_type = other DNA

SEQ ID NO: 24891 - DNA, 615 bp, synthetic construct; identical to SEQ ID NO: 700
  source 1..615: mol_type = other DNA

SEQ ID NO: 24892 - DNA, 616 bp, synthetic construct; identical to SEQ ID NO: 701
  source 1..616: mol_type = other DNA

SEQ ID NO: 24893 - DNA, 616 bp, synthetic construct; identical to SEQ ID NO: 703
  source 1..616: mol_type = other DNA

SEQ ID NO: 24894 - DNA, 616 bp, synthetic construct; identical to SEQ ID NO: 704
  source 1..616: mol_type = other DNA

SEQ ID NO: 24895 - DNA, 616 bp, synthetic construct; identical to SEQ ID NO: 705
  source 1..616: mol_type = other DNA

SEQ ID NO: 24896 - DNA, 617 bp, synthetic construct; identical to SEQ ID NO: 707
  source 1..617: mol_type = other DNA

SEQ ID NO: 24897 - DNA, 617 bp, synthetic construct; identical to SEQ ID NO: 708
  source 1..617: mol_type = other DNA

SEQ ID NO: 24898 - DNA, 617 bp, synthetic construct; identical to SEQ ID NO: 710
  source 1..617: mol_type = other DNA

SEQ ID NO: 24899 - DNA, 618 bp, synthetic construct; identical to SEQ ID NO: 711
  source 1..618: mol_type = other DNA

SEQ ID NO: 24900 - DNA, 618 bp, synthetic construct; identical to SEQ ID NO: 713
  source 1..618: mol_type = other DNA

SEQ ID NO: 24901 - DNA, 618 bp, synthetic construct; identical to SEQ ID NO: 714
  source 1..618: mol_type = other DNA

SEQ ID NO: 24902 - DNA, 619 bp, synthetic construct; identical to SEQ ID NO: 718
  source 1..619: mol_type = other DNA

SEQ ID NO: 24903 - DNA, 620 bp, synthetic construct; identical to SEQ ID NO: 720
  source 1..620: mol_type = other DNA

SEQ ID NO: 24904 - DNA, 620 bp, synthetic construct; identical to SEQ ID NO: 721
  source 1..620: mol_type = other DNA

SEQ ID NO: 24905 - DNA, 620 bp, synthetic construct; identical to SEQ ID NO: 722
  source 1..620: mol_type = other DNA

SEQ ID NO: 24906 - DNA, 621 bp, synthetic construct; identical to SEQ ID NO: 724
  source 1..621: mol_type = other DNA

SEQ ID NO: 24907 - DNA, 622 bp, synthetic construct; identical to SEQ ID NO: 728
  source 1..622: mol_type = other DNA

SEQ ID NO: 24908 - DNA, 622 bp, synthetic construct; identical to SEQ ID NO: 729
  source 1..622: mol_type = other DNA

SEQ ID NO: 24909 - DNA, 623 bp, synthetic construct; identical to SEQ ID NO: 733
  source 1..623: mol_type = other DNA

SEQ ID NO: 24910 - DNA, 623 bp, synthetic construct; identical to SEQ ID NO: 734
  source 1..623: mol_type = other DNA

SEQ ID NO: 24911 - DNA, 624 bp, synthetic construct; identical to SEQ ID NO: 738
  source 1..624: mol_type = other DNA

SEQ ID NO: 24912 - DNA, 624 bp, synthetic construct; identical to SEQ ID NO: 739
  source 1..624: mol_type = other DNA

SEQ ID NO: 24913 - DNA, 625 bp, synthetic construct; identical to SEQ ID NO: 741
  source 1..625: mol_type = other DNA

SEQ ID NO: 24914 - DNA, 625 bp, synthetic construct; identical to SEQ ID NO: 743
  source 1..625: mol_type = other DNA

SEQ ID NO: 24915 - DNA, 625 bp, synthetic construct; identical to SEQ ID NO: 744
  source 1..625: mol_type = other DNA

SEQ ID NO: 24916 - DNA, 625 bp, synthetic construct; identical to SEQ ID NO: 746
  source 1..625: mol_type = other DNA

SEQ ID NO: 24917 - DNA, 626 bp, synthetic construct; identical to SEQ ID NO: 747
  source 1..626: mol_type = other DNA

SEQ ID NO: 24918 - DNA, 626 bp, synthetic construct; identical to SEQ ID NO: 748
  source 1..626: mol_type = other DNA

SEQ ID NO: 24919 - DNA, 626 bp, synthetic construct; identical to SEQ ID NO: 749
  source 1..626: mol_type = other DNA

SEQ ID NO: 24920 - DNA, 627 bp, synthetic construct; identical to SEQ ID NO: 751
  source 1..627: mol_type = other DNA

SEQ ID NO: 24921 - DNA, 627 bp, synthetic construct; identical to SEQ ID NO: 752
  source 1..627: mol_type = other DNA

SEQ ID NO: 24922 - DNA, 628 bp, synthetic construct; identical to SEQ ID NO: 753
  source 1..628: mol_type = other DNA

SEQ ID NO: 24923 - DNA, 630 bp, synthetic construct; identical to SEQ ID NO: 755
  source 1..630: mol_type = other DNA

SEQ ID NO: 24924 - DNA, 631 bp, synthetic construct; identical to SEQ ID NO: 756
  source 1..631: mol_type = other DNA

SEQ ID NO: 24925 - DNA, 633 bp, synthetic construct; identical to SEQ ID NO: 760
  source 1..633: mol_type = other DNA

SEQ ID NO: 24926 - DNA, 639 bp, synthetic construct; identical to SEQ ID NO: 767
  source 1..639: mol_type = other DNA

SEQ ID NO: 24927 - DNA, 641 bp, synthetic construct; identical to SEQ ID NO: 771
  source 1..641: mol_type = other DNA

SEQ ID NO: 24928 - DNA, 642 bp, synthetic construct; identical to SEQ ID NO: 773
  source 1..642: mol_type = other DNA

SEQ ID NO: 24929 - DNA, 643 bp, synthetic construct; identical to SEQ ID NO: 774
  source 1..643: mol_type = other DNA

SEQ ID NO: 24930 - DNA, 643 bp, synthetic construct; identical to SEQ ID NO: 776
  source 1..643: mol_type = other DNA

SEQ ID NO: 24931 - DNA, 647 bp, synthetic construct; identical to SEQ ID NO: 782
  source 1..647: mol_type = other DNA

SEQ ID NO: 24932 - DNA, 648 bp, synthetic construct; identical to SEQ ID NO: 783
  source 1..648: mol_type = other DNA

SEQ ID NO: 24933 - DNA, 648 bp, synthetic construct; identical to SEQ ID NO: 784
  source 1..648: mol_type = other DNA

SEQ ID NO: 24934 - DNA, 649 bp, synthetic construct; identical to SEQ ID NO: 785
  source 1..649: mol_type = other DNA

SEQ ID NO: 24935 - DNA, 651 bp, synthetic construct; identical to SEQ ID NO: 787
  source 1..651: mol_type = other DNA

SEQ ID NO: 24936 - DNA, 651 bp, synthetic construct; identical to SEQ ID NO: 788
  source 1..651: mol_type = other DNA

SEQ ID NO: 24937 - DNA, 654 bp, synthetic construct; identical to SEQ ID NO: 791
  source 1..654: mol_type = other DNA

SEQ ID NO: 24938 - DNA, 655 bp, synthetic construct; identical to SEQ ID NO: 792
  source 1..655: mol_type = other DNA

SEQ ID NO: 24939 - DNA, 655 bp, synthetic construct; identical to SEQ ID NO: 793
  source 1..655: mol_type = other DNA

SEQ ID NO: 24940 - DNA, 664 bp, synthetic construct; identical to SEQ ID NO: 802
  source 1..664: mol_type = other DNA

SEQ ID NO: 24941 - DNA, 666 bp, synthetic construct; identical to SEQ ID NO: 806
  source 1..666: mol_type = other DNA

SEQ ID NO: 24942 - DNA, 667 bp, synthetic construct; identical to SEQ ID NO: 808
  source 1..667: mol_type = other DNA

SEQ ID NO: 24943 - DNA, 672 bp, synthetic construct; identical to SEQ ID NO: 814
  source 1..672: mol_type = other DNA

SEQ ID NO: 24944 - DNA, 673 bp, synthetic construct; identical to SEQ ID NO: 816
  source 1..673: mol_type = other DNA

SEQ ID NO: 24945 - DNA, 675 bp, synthetic construct; identical to SEQ ID NO: 817
  source 1..675: mol_type = other DNA

SEQ ID NO: 24946 - DNA, 682 bp, synthetic construct; identical to SEQ ID NO: 819
  source 1..682: mol_type = other DNA

SEQ ID NO: 24947 - DNA, 683 bp, synthetic construct; identical to SEQ ID NO: 820
  source 1..683: mol_type = other DNA

SEQ ID NO: 24948 - DNA, 686 bp, synthetic construct; identical to SEQ ID NO: 823
  source 1..686: mol_type = other DNA

SEQ ID NO: 24949 - DNA, 689 bp, synthetic construct; identical to SEQ ID NO: 826
  source 1..689: mol_type = other DNA

SEQ ID NO: 24950 - DNA, 689 bp, synthetic construct; identical to SEQ ID NO: 827
  source 1..689: mol_type = other DNA

SEQ ID NO: 24951 - DNA, 693 bp, synthetic construct; identical to SEQ ID NO: 830
  source 1..693: mol_type = other DNA

SEQ ID NO: 24952 - DNA, 693 bp, synthetic construct; identical to SEQ ID NO: 831
  source 1..693: mol_type = other DNA

SEQ ID NO: 24953 - DNA, 694 bp, synthetic construct; identical to SEQ ID NO: 833
  source 1..694: mol_type = other DNA

SEQ ID NO: 24954 - DNA, 695 bp, synthetic construct; identical to SEQ ID NO: 834
  source 1..695: mol_type = other DNA

SEQ ID NO: 24955 - DNA, 697 bp, synthetic construct; identical to SEQ ID NO: 836
  source 1..697: mol_type = other DNA

SEQ ID NO: 24956 - DNA, 698 bp, synthetic construct; identical to SEQ ID NO: 839
  source 1..698: mol_type = other DNA

SEQ ID NO: 24957 - DNA, 698 bp, synthetic construct; identical to SEQ ID NO: 840
  source 1..698: mol_type = other DNA

SEQ ID NO: 24958 - DNA, 699 bp, synthetic construct; identical to SEQ ID NO: 841
  source 1..699: mol_type = other DNA

SEQ ID NO: 24959 - DNA, 699 bp, synthetic construct; identical to SEQ ID NO: 842
  source 1..699: mol_type = other DNA

SEQ ID NO: 24960 - DNA, 700 bp, synthetic construct; identical to SEQ ID NO: 843
  source 1..700: mol_type = other DNA

SEQ ID NO: 24961 - DNA, 702 bp, synthetic construct; identical to SEQ ID NO: 844
  source 1..702: mol_type = other DNA

SEQ ID NO: 24962 - DNA, 704 bp, synthetic construct; identical to SEQ ID NO: 846
  source 1..704: mol_type = other DNA

SEQ ID NO: 24963 - DNA, 704 bp, synthetic construct; identical to SEQ ID NO: 847
  source 1..704: mol_type = other DNA

SEQ ID NO: 24964 - DNA, 707 bp, synthetic construct; identical to SEQ ID NO: 849
  source 1..707: mol_type = other DNA

SEQ ID NO: 24965 - DNA, 707 bp, synthetic construct; identical to SEQ ID NO: 850
  source 1..707: mol_type = other DNA

SEQ ID NO: 24966 - DNA, 708 bp, synthetic construct; identical to SEQ ID NO: 851
  source 1..708: mol_type = other DNA

SEQ ID NO: 24967 - DNA, 708 bp, synthetic construct; identical to SEQ ID NO: 853
  source 1..708: mol_type = other DNA

SEQ ID NO: 24968 - DNA, 709 bp, synthetic construct; identical to SEQ ID NO: 855
  source 1..709: mol_type = other DNA

SEQ ID NO: 24969 - DNA, 710 bp, synthetic construct; identical to SEQ ID NO: 857
  source 1..710: mol_type = other DNA

SEQ ID NO: 24970 - DNA, 710 bp, synthetic construct; identical to SEQ ID NO: 858
  source 1..710: mol_type = other DNA

SEQ ID NO: 24971 - DNA, 711 bp, synthetic construct; identical to SEQ ID NO: 861
  source 1..711: mol_type = other DNA

SEQ ID NO: 24972 - DNA, 711 bp, synthetic construct; identical to SEQ ID NO: 862
  source 1..711: mol_type = other DNA

SEQ ID NO: 24973 - DNA, 711 bp, synthetic construct; identical to SEQ ID NO: 863
  source 1..711: mol_type = other DNA

SEQ ID NO: 24974 - DNA, 711 bp, synthetic construct; identical to SEQ ID NO: 864
  source 1..711: mol_type = other DNA

SEQ ID NO: 24975 - DNA, 711 bp, synthetic construct; identical to SEQ ID NO: 865
  source 1..711: mol_type = other DNA

SEQ ID NO: 24976 - DNA, 712 bp, synthetic construct; identical to SEQ ID NO: 867
  source 1..712: mol_type = other DNA

SEQ ID NO: 24977 - DNA, 712 bp, synthetic construct; identical to SEQ ID NO: 869
  source 1..712: mol_type = other DNA

SEQ ID NO: 24978 - DNA, 712 bp, synthetic construct; identical to SEQ ID NO: 870
  source 1..712: mol_type = other DNA

SEQ ID NO: 24979 - DNA, 713 bp, synthetic construct; identical to SEQ ID NO: 871
  source 1..713: mol_type = other DNA

SEQ ID NO: 24980 - DNA, 714 bp, synthetic construct; identical to SEQ ID NO: 875
  source 1..714: mol_type = other DNA

SEQ ID NO: 24981 - DNA, 714 bp, synthetic construct; identical to SEQ ID NO: 876
  source 1..714: mol_type = other DNA

SEQ ID NO: 24982 - DNA, 715 bp, synthetic construct; identical to SEQ ID NO: 884
  source 1..715: mol_type = other DNA

SEQ ID NO: 24983 - DNA, 715 bp, synthetic construct; identical to SEQ ID NO: 885
  source 1..715: mol_type = other DNA

SEQ ID NO: 24984 - DNA, 716 bp, synthetic construct; identical to SEQ ID NO: 888
  source 1..716: mol_type = other DNA

SEQ ID NO: 24985 - DNA, 716 bp, synthetic construct; identical to SEQ ID NO: 889
  source 1..716: mol_type = other DNA

SEQ ID NO: 24986 - DNA, 716 bp, synthetic construct; identical to SEQ ID NO: 890
  source 1..716: mol_type = other DNA

SEQ ID NO: 24987 - DNA, 717 bp, synthetic construct; identical to SEQ ID NO: 891
  source 1..717: mol_type = other DNA

SEQ ID NO: 24988 - DNA, 717 bp, synthetic construct; identical to SEQ ID NO: 892
  source 1..717: mol_type = other DNA

SEQ ID NO: 24989 - DNA, 719 bp, synthetic construct; identical to SEQ ID NO: 893
  source 1..719: mol_type = other DNA

SEQ ID NO: 24990 - DNA, 719 bp, synthetic construct; identical to SEQ ID NO: 894
  source 1..719: mol_type = other DNA

SEQ ID NO: 24991 - DNA, 721 bp, synthetic construct; identical to SEQ ID NO: 898
  source 1..721: mol_type = other DNA

SEQ ID NO: 24992 - DNA, 721 bp, synthetic construct; identical to SEQ ID NO: 899
  source 1..721: mol_type = other DNA

SEQ ID NO: 24993 - DNA, 722 bp, synthetic construct; identical to SEQ ID NO: 900
  source 1..722: mol_type = other DNA

SEQ ID NO: 24994 - DNA, 723 bp, synthetic construct; identical to SEQ ID NO: 902
  source 1..723: mol_type = other DNA

SEQ ID NO: 24995 - DNA, 723 bp, synthetic construct; identical to SEQ ID NO: 903
  source 1..723: mol_type = other DNA

SEQ ID NO: 24996 - DNA, 723 bp, synthetic construct; identical to SEQ ID NO: 904
  source 1..723: mol_type = other DNA

SEQ ID NO: 24997 - DNA, 723 bp, synthetic construct; identical to SEQ ID NO: 905
  source 1..723: mol_type = other DNA

SEQ ID NO: 24998 - DNA, 724 bp, synthetic construct; identical to SEQ ID NO: 906
  source 1..724: mol_type = other DNA

SEQ ID NO: 24999 - DNA, 724 bp, synthetic construct; identical to SEQ ID NO: 907
  source 1..724: mol_type = other DNA

SEQ ID NO: 25000 - DNA, 725 bp, synthetic construct; identical to SEQ ID NO: 910
  source 1..725: mol_type = other DNA

SEQ ID NO: 25001 - DNA, 725 bp, synthetic construct; identical to SEQ ID NO: 911
  source 1..725: mol_type = other DNA

SEQ ID NO: 25002 - DNA, 725 bp, synthetic construct; identical to SEQ ID NO: 912
  source 1..725: mol_type = other DNA

SEQ ID NO: 25003 - DNA, 725 bp, synthetic construct; identical to SEQ ID NO: 913
  source 1..725: mol_type = other DNA

SEQ ID NO: 25004 - DNA, 725 bp, synthetic construct; identical to SEQ ID NO: 914
  source 1..725: mol_type = other DNA

SEQ ID NO: 25005 - DNA, 725 bp, synthetic construct; identical to SEQ ID NO: 915
  source 1..725: mol_type = other DNA

SEQ ID NO: 25006 - DNA, 726 bp, synthetic construct; identical to SEQ ID NO: 916
  source 1..726: mol_type = other DNA

SEQ ID NO: 25007 - DNA, 726 bp, synthetic construct; identical to SEQ ID NO: 917
  source 1..726: mol_type = other DNA

SEQ ID NO: 25008 - DNA, 726 bp, synthetic construct; identical to SEQ ID NO: 918
  source 1..726: mol_type = other DNA

SEQ ID NO: 25009 - DNA, 726 bp, synthetic construct; identical to SEQ ID NO: 919
  source 1..726: mol_type = other DNA

SEQ ID NO: 25010 - DNA, 727 bp, synthetic construct; identical to SEQ ID NO: 920
  source 1..727: mol_type = other DNA

SEQ ID NO: 25011 - DNA, 728 bp, synthetic construct; identical to SEQ ID NO: 921
  source 1..728: mol_type = other DNA

SEQ ID NO: 25012 - DNA, 729 bp, synthetic construct; identical to SEQ ID NO: 922
  source 1..729: mol_type = other DNA

SEQ ID NO: 25013 - DNA, 729 bp, synthetic construct; identical to SEQ ID NO: 923
  source 1..729: mol_type = other DNA

SEQ ID NO: 25014 - DNA, 729 bp, synthetic construct; identical to SEQ ID NO: 924
  source 1..729: mol_type = other DNA

SEQ ID NO: 25015 - DNA, 729 bp, synthetic construct; identical to SEQ ID NO: 925
  source 1..729: mol_type = other DNA

SEQ ID NO: 25016 - DNA, 730 bp, synthetic construct; identical to SEQ ID NO: 927
  source 1..730: mol_type = other DNA

SEQ ID NO: 25017 - DNA, 730 bp, synthetic construct; identical to SEQ ID NO: 928
  source 1..730: mol_type = other DNA

SEQ ID NO: 25018 - DNA, 730 bp, synthetic construct; identical to SEQ ID NO: 929
  source 1..730: mol_type = other DNA

SEQ ID NO: 25019 - DNA, 731 bp, synthetic construct; identical to SEQ ID NO: 932
  source 1..731: mol_type = other DNA

SEQ ID NO: 25020 - DNA, 732 bp, synthetic construct; identical to SEQ ID NO: 934
  source 1..732: mol_type = other DNA

SEQ ID NO: 25021 - DNA, 732 bp, synthetic construct; identical to SEQ ID NO: 935
  source 1..732: mol_type = other DNA

SEQ ID NO: 25022 - DNA, 732 bp, synthetic construct; identical to SEQ ID NO: 936
  source 1..732: mol_type = other DNA

SEQ ID NO: 25023 - DNA, 733 bp, synthetic construct; identical to SEQ ID NO: 937
  source 1..733: mol_type = other DNA

SEQ ID NO: 25024 - DNA, 733 bp, synthetic construct; identical to SEQ ID NO: 938
  source 1..733: mol_type = other DNA

SEQ ID NO: 25025 - DNA, 733 bp, synthetic construct; identical to SEQ ID NO: 939
  source 1..733: mol_type = other DNA

SEQ ID NO: 25026 - DNA, 734 bp, synthetic construct; identical to SEQ ID NO: 942
  source 1..734: mol_type = other DNA

SEQ ID NO: 25027 - DNA, 734 bp, synthetic construct; identical to SEQ ID NO: 943
  source 1..734: mol_type = other DNA

SEQ ID NO: 25028 - DNA, 734 bp, synthetic construct; identical to SEQ ID NO: 945
  source 1..734: mol_type = other DNA

SEQ ID NO: 25029 - DNA, 734 bp, synthetic construct; identical to SEQ ID NO: 946
  source 1..734: mol_type = other DNA

SEQ ID NO: 25030 - DNA, 735 bp, synthetic construct; identical to SEQ ID NO: 947
  source 1..735: mol_type = other DNA

SEQ ID NO: 25031 - DNA, 735 bp, synthetic construct; identical to SEQ ID NO: 948
  source 1..735: mol_type = other DNA

SEQ ID NO: 25032 - DNA, 735 bp, synthetic construct; identical to SEQ ID NO: 949
  source 1..735: mol_type = other DNA

SEQ ID NO: 25033 - DNA, 735 bp, synthetic construct; identical to SEQ ID NO: 950
  source 1..735: mol_type = other DNA

SEQ ID NO: 25034 - DNA, 736 bp, synthetic construct; identical to SEQ ID NO: 951
  source 1..736: mol_type = other DNA

SEQ ID NO: 25035 - DNA, 736 bp, synthetic construct; identical to SEQ ID NO: 953
  source 1..736: mol_type = other DNA

SEQ ID NO: 25036 - DNA, 736 bp, synthetic construct; identical to SEQ ID NO: 954
  source 1..736: mol_type = other DNA

SEQ ID NO: 25037 - DNA, 737 bp, synthetic construct; identical to SEQ ID NO: 955
  source 1..737: mol_type = other DNA

SEQ ID NO: 25038 - DNA, 737 bp, synthetic construct; identical to SEQ ID NO: 956
  source 1..737: mol_type = other DNA

SEQ ID NO: 25039 - DNA, 737 bp, synthetic construct; identical to SEQ ID NO: 957
  source 1..737: mol_type = other DNA

SEQ ID NO: 25040 - DNA, 737 bp, synthetic construct; identical to SEQ ID NO: 958
  source 1..737: mol_type = other DNA

SEQ ID NO: 25041 - DNA, 737 bp, synthetic construct; identical to SEQ ID NO: 959
  source 1..737: mol_type = other DNA

SEQ ID NO: 25042 - DNA, 738 bp, synthetic construct; identical to SEQ ID NO: 960
  source 1..738: mol_type = other DNA

SEQ ID NO: 25043 - DNA, 738 bp, synthetic construct; identical to SEQ ID NO: 961
  source 1..738: mol_type = other DNA

SEQ ID NO: 25044 - DNA, 739 bp, synthetic construct; identical to SEQ ID NO: 962
  source 1..739: mol_type = other DNA

SEQ ID NO: 25045 - DNA, 739 bp, synthetic construct; identical to SEQ ID NO: 964
  source 1..739: mol_type = other DNA

SEQ ID NO: 25046 - DNA, 740 bp, synthetic construct; identical to SEQ ID NO: 965
  source 1..740: mol_type = other DNA

SEQ ID NO: 25047 - DNA, 740 bp, synthetic construct; identical to SEQ ID NO: 966
  source 1..740: mol_type = other DNA

SEQ ID NO: 25048 - DNA, 740 bp, synthetic construct; identical to SEQ ID NO: 967
  source 1..740: mol_type = other DNA

SEQ ID NO: 25049 - DNA, 741 bp, synthetic construct; identical to SEQ ID NO: 969
  source 1..741: mol_type = other DNA

SEQ ID NO: 25050 - DNA, 741 bp, synthetic construct; identical to SEQ ID NO: 970
  source 1..741: mol_type = other DNA

SEQ ID NO: 25051 - DNA, 741 bp, synthetic construct; identical to SEQ ID NO: 971
  source 1..741: mol_type = other DNA

SEQ ID NO: 25052 - DNA, 741 bp, synthetic construct; identical to SEQ ID NO: 972
  source 1..741: mol_type = other DNA

SEQ ID NO: 25053 - DNA, 741 bp, synthetic construct; identical to SEQ ID NO: 974
  source 1..741: mol_type = other DNA

SEQ ID NO: 25054 - DNA, 741 bp, synthetic construct; identical to SEQ ID NO: 975
  source 1..741: mol_type = other DNA

SEQ ID NO: 25055 - DNA, 741 bp, synthetic construct; identical to SEQ ID NO: 976
  source 1..741: mol_type = other DNA

SEQ ID NO: 25056 - DNA, 741 bp, synthetic construct; identical to SEQ ID NO: 977
  source 1..741: mol_type = other DNA

SEQ ID NO: 25057 - DNA, 741 bp, synthetic construct; identical to SEQ ID NO: 978
  source 1..741: mol_type = other DNA

SEQ ID NO: 25058 - DNA, 741 bp, synthetic construct; identical to SEQ ID NO: 979
  source 1..741: mol_type = other DNA

SEQ ID NO: 25059 - DNA, 741 bp, synthetic construct; identical to SEQ ID NO: 980
  source 1..741: mol_type = other DNA

SEQ ID NO: 25060 - DNA, 741 bp, synthetic construct; identical to SEQ ID NO: 981
  source 1..741: mol_type = other DNA

SEQ ID NO: 25061 - DNA, 741 bp, synthetic construct; identical to SEQ ID NO: 982
  source 1..741: mol_type = other DNA

SEQ ID NO: 25062 - DNA, 741 bp, synthetic construct; identical to SEQ ID NO: 983
  source 1..741: mol_type = other DNA

SEQ ID NO: 25063 - DNA, 741 bp, synthetic construct; identical to SEQ ID NO: 984
  source 1..741: mol_type = other DNA

SEQ ID NO: 25064 - DNA, 742 bp, synthetic construct; identical to SEQ ID NO: 985
  source 1..742: mol_type = other DNA

SEQ ID NO: 25065 - DNA, 742 bp, synthetic construct; identical to SEQ ID NO: 986
  source 1..742: mol_type = other DNA

SEQ ID NO: 25066 - DNA, 742 bp, synthetic construct; identical to SEQ ID NO: 987
  source 1..742: mol_type = other DNA

SEQ ID NO: 25067 - DNA, 742 bp, synthetic construct; identical to SEQ ID NO: 988
  source 1..742: mol_type = other DNA

SEQ ID NO: 25068 - DNA, 742 bp, synthetic construct; identical to SEQ ID NO: 989
  source 1..742: mol_type = other DNA

SEQ ID NO: 25069 - DNA, 742 bp, synthetic construct; identical to SEQ ID NO: 990
  source 1..742: mol_type = other DNA

SEQ ID NO: 25070 - DNA, 742 bp, synthetic construct; identical to SEQ ID NO: 991
  source 1..742: mol_type = other DNA

SEQ ID NO: 25071 - DNA, 742 bp, synthetic construct; identical to SEQ ID NO: 992
  source 1..742: mol_type = other DNA

SEQ ID NO: 25072 - DNA, 742 bp, synthetic construct; identical to SEQ ID NO: 993
  source 1..742: mol_type = other DNA

SEQ ID NO: 25073 - DNA, 742 bp, synthetic construct; identical to SEQ ID NO: 994
  source 1..742: mol_type = other DNA

SEQ ID NO: 25074 - DNA, 742 bp, synthetic construct; identical to SEQ ID NO: 995
  source 1..742: mol_type = other DNA

SEQ ID NO: 25075 - DNA, 742 bp, synthetic construct; identical to SEQ ID NO: 996
  source 1..742: mol_type = other DNA

SEQ ID NO: 25076 - DNA, 742 bp, synthetic construct; identical to SEQ ID NO: 997
  source 1..742: mol_type = other DNA

SEQ ID NO: 25077 - DNA, 742 bp, synthetic construct; identical to SEQ ID NO: 998
  source 1..742: mol_type = other DNA

SEQ ID NO: 25078 - DNA, 742 bp, synthetic construct; identical to SEQ ID NO: 999
  source 1..742: mol_type = other DNA

SEQ ID NO: 25079 - DNA, 742 bp, synthetic construct; identical to SEQ ID NO: 1000
  source 1..742: mol_type = other DNA

SEQ ID NO: 25080 - DNA, 742 bp, synthetic construct; identical to SEQ ID NO: 1001
  source 1..742: mol_type = other DNA

SEQ ID NO: 25081 - DNA, 742 bp, synthetic construct; identical to SEQ ID NO: 1002
  source 1..742: mol_type = other DNA

SEQ ID NO: 25082 - DNA, 742 bp, synthetic construct; identical to SEQ ID NO: 1003
  source 1..742: mol_type = other DNA

SEQ ID NO: 25083 - DNA, 742 bp, synthetic construct; identical to SEQ ID NO: 1004
  source 1..742: mol_type = other DNA

SEQ ID NO: 25084 - DNA, 742 bp, synthetic construct; identical to SEQ ID NO: 1005
  source 1..742: mol_type = other DNA

SEQ ID NO: 25085 - DNA, 742 bp, synthetic construct; identical to SEQ ID NO: 1006
  source 1..742: mol_type = other DNA

SEQ ID NO: 25086 - DNA, 742 bp, synthetic construct; identical to SEQ ID NO: 1007
  source 1..742: mol_type = other DNA

SEQ ID NO: 25087 - DNA, 742 bp, synthetic construct; identical to SEQ ID NO: 1008
  source 1..742: mol_type = other DNA

SEQ ID NO: 25088 - DNA, 742 bp, synthetic construct; identical to SEQ ID NO: 1009
  source 1..742: mol_type = other DNA

SEQ ID NO: 25089 - DNA, 742 bp, synthetic construct; identical to SEQ ID NO: 1010
  source 1..742: mol_type = other DNA

SEQ ID NO: 25090 - DNA, 742 bp, synthetic construct; identical to SEQ ID NO: 1011
  source 1..742: mol_type = other DNA

SEQ ID NO: 25091 - DNA, 742 bp, synthetic construct; identical to SEQ ID NO: 1012
  source 1..742: mol_type = other DNA

SEQ ID NO: 25092 - DNA, 742 bp, synthetic construct; identical to SEQ ID NO: 1014
  source 1..742: mol_type = other DNA

SEQ ID NO: 25093 - DNA, 742 bp, synthetic construct; identical to SEQ ID NO: 1015
  source 1..742: mol_type = other DNA

SEQ ID NO: 25094 - DNA, 742 bp, synthetic construct; identical to SEQ ID NO: 1016
  source 1..742: mol_type = other DNA

SEQ ID NO: 25095 - DNA, 742 bp, synthetic construct; identical to SEQ ID NO: 1017
  source 1..742: mol_type = other DNA

SEQ ID NO: 25096 - DNA, 742 bp, synthetic construct; identical to SEQ ID NO: 1018
  source 1..742: mol_type = other DNA

SEQ ID NO: 25097 - DNA, 742 bp, synthetic construct; identical to SEQ ID NO: 1019
  source 1..742: mol_type = other DNA

SEQ ID NO: 25098 - DNA, 742 bp, synthetic construct; identical to SEQ ID NO: 1020
  source 1..742: mol_type = other DNA

SEQ ID NO: 25099 - DNA, 742 bp, synthetic construct; identical to SEQ ID NO: 1021
  source 1..742: mol_type = other DNA

SEQ ID NO: 25100 - DNA, 742 bp, synthetic construct; identical to SEQ ID NO: 1023
  source 1..742: mol_type = other DNA

SEQ ID NO: 25101 - DNA, 743 bp, synthetic construct; identical to SEQ ID NO: 1024
  source 1..743: mol_type = other DNA

SEQ ID NO: 25102 - DNA, 743 bp, synthetic construct; identical to SEQ ID NO: 1025
  source 1..743: mol_type = other DNA

SEQ ID NO: 25103 - DNA, 743 bp, synthetic construct; identical to SEQ ID NO: 1026
  source 1..743: mol_type = other DNA

SEQ ID NO: 25104 - DNA, 743 bp, synthetic construct; identical to SEQ ID NO: 1027
  source 1..743: mol_type = other DNA

SEQ ID NO: 25105 - DNA, 743 bp, synthetic construct; identical to SEQ ID NO: 1028
  source 1..743: mol_type = other DNA

SEQ ID NO: 25106 - DNA, 743 bp, synthetic construct; identical to SEQ ID NO: 1029
  source 1..743: mol_type = other DNA

SEQ ID NO: 25107 - DNA, 743 bp, synthetic construct; identical to SEQ ID NO: 1030
  source 1..743: mol_type = other DNA

SEQ ID NO: 25108 - DNA, 743 bp, synthetic construct; identical to SEQ ID NO: 1031
  source 1..743: mol_type = other DNA

SEQ ID NO: 25109 - DNA, 743 bp, synthetic construct; identical to SEQ ID NO: 1032
  source 1..743: mol_type = other DNA

SEQ ID NO: 25110 - DNA, 743 bp, synthetic construct; identical to SEQ ID NO: 1033
  source 1..743: mol_type = other DNA

SEQ ID NO: 25111 - DNA, 743 bp, synthetic construct; identical to SEQ ID NO: 1035
  source 1..743: mol_type = other DNA

SEQ ID NO: 25112 - DNA, 743 bp, synthetic construct; identical to SEQ ID NO: 1036
  source 1..743: mol_type = other DNA

SEQ ID NO: 25113 - DNA, 743 bp, synthetic construct; identical to SEQ ID NO: 1037
  source 1..743: mol_type = other DNA

SEQ ID NO: 25114 - DNA, 743 bp, synthetic construct; identical to SEQ ID NO: 1038
  source 1..743: mol_type = other DNA

SEQ ID NO: 25115 - DNA, 743 bp, synthetic construct; identical to SEQ ID NO: 1039
  source 1..743: mol_type = other DNA

SEQ ID NO: 25116 - DNA, 743 bp, synthetic construct; identical to SEQ ID NO: 1040
  source 1..743: mol_type = other DNA

SEQ ID NO: 25117 - DNA, 743 bp, synthetic construct; identical to SEQ ID NO: 1041
  source 1..743: mol_type = other DNA

SEQ ID NO: 25118 - DNA, 743 bp, synthetic construct; identical to SEQ ID NO: 1042
  source 1..743: mol_type = other DNA

SEQ ID NO: 25119 - DNA, 743 bp, synthetic construct; identical to SEQ ID NO: 1044
  source 1..743: mol_type = other DNA

SEQ ID NO: 25120 - DNA, 743 bp, synthetic construct; identical to SEQ ID NO: 1045
  source 1..743: mol_type = other DNA

SEQ ID NO: 25121 - DNA, 743 bp, synthetic construct; identical to SEQ ID NO: 1047
  source 1..743: mol_type = other DNA

SEQ ID NO: 25122 - DNA, 743 bp, synthetic construct; identical to SEQ ID NO: 1048
  source 1..743: mol_type = other DNA

SEQ ID NO: 25123 - DNA, 743 bp, synthetic construct; identical to SEQ ID NO: 1051
  source 1..743: mol_type = other DNA

SEQ ID NO: 25124 - DNA, 743 bp, synthetic construct; identical to SEQ ID NO: 1054
  source 1..743: mol_type = other DNA

SEQ ID NO: 25125 - DNA, 743 bp, synthetic construct; identical to SEQ ID NO: 1055
  source 1..743: mol_type = other DNA

SEQ ID NO: 25126 - DNA, 743 bp, synthetic construct; identical to SEQ ID NO: 1056
  source 1..743: mol_type = other DNA

SEQ ID NO: 25127 - DNA, 743 bp, synthetic construct; identical to SEQ ID NO: 1057
  source 1..743: mol_type = other DNA

SEQ ID NO: 25128 - DNA, 743 bp, synthetic construct; identical to SEQ ID NO: 1058
  source 1..743: mol_type = other DNA

SEQ ID NO: 25129 - DNA, 744 bp, synthetic construct; identical to SEQ ID NO: 1059
  source 1..744: mol_type = other DNA

SEQ ID NO: 25130 - DNA, 744 bp, synthetic construct; identical to SEQ ID NO: 1060
  source 1..744: mol_type = other DNA

SEQ ID NO: 25131 - DNA, 744 bp, synthetic construct; identical to SEQ ID NO: 1061
  source 1..744: mol_type = other DNA

SEQ ID NO: 25132 - DNA, 744 bp, synthetic construct; identical to SEQ ID NO: 1062
  source 1..744: mol_type = other DNA

SEQ ID NO: 25133 - DNA, 744 bp, synthetic construct; identical to SEQ ID NO: 1063
  source 1..744: mol_type = other DNA

SEQ ID NO: 25134 - DNA, 744 bp, synthetic construct; identical to SEQ ID NO: 1064
  source 1..744: mol_type = other DNA

SEQ ID NO: 25135 - DNA, 744 bp, synthetic construct; identical to SEQ ID NO: 1065
  source 1..744: mol_type = other DNA

SEQ ID NO: 25136 - DNA, 744 bp, synthetic construct; identical to SEQ ID NO: 1066
  source 1..744: mol_type = other DNA

SEQ ID NO: 25137 - DNA, 744 bp, synthetic construct; identical to SEQ ID NO: 1067
  source 1..744: mol_type = other DNA

SEQ ID NO: 25138 - DNA, 744 bp, synthetic construct; identical to SEQ ID NO: 1068
  source 1..744: mol_type = other DNA

SEQ ID NO: 25139 - DNA, 744 bp, synthetic construct; identical to SEQ ID NO: 1069
  source 1..744: mol_type = other DNA

SEQ ID NO: 25140 - DNA, 744 bp, synthetic construct; identical to SEQ ID NO: 1072
  source 1..744: mol_type = other DNA

SEQ ID NO: 25141 - DNA, 744 bp, synthetic construct; identical to SEQ ID NO: 1073
  source 1..744: mol_type = other DNA

SEQ ID NO: 25142 - DNA, 744 bp, synthetic construct; identical to SEQ ID NO: 1074
  source 1..744: mol_type = other DNA

SEQ ID NO: 25143 - DNA, 744 bp, synthetic construct; identical to SEQ ID NO: 1076
  source 1..744: mol_type = other DNA

SEQ ID NO: 25144 - DNA, 744 bp, synthetic construct; identical to SEQ ID NO: 1077
  source 1..744: mol_type = other DNA

SEQ ID NO: 25145 - DNA, 744 bp, synthetic construct; identical to SEQ ID NO: 1078
  source 1..744: mol_type = other DNA

SEQ ID NO: 25146 - DNA, 744 bp, synthetic construct; identical to SEQ ID NO: 1079
  source 1..744: mol_type = other DNA

SEQ ID NO: 25147 - DNA, 744 bp, synthetic construct; identical to SEQ ID NO: 1081
  source 1..744: mol_type = other DNA

SEQ ID NO: 25148 - DNA, 744 bp, synthetic construct; identical to SEQ ID NO: 1082
  source 1..744: mol_type = other DNA

SEQ ID NO: 25149 - DNA, 744 bp, synthetic construct; identical to SEQ ID NO: 1084
  source 1..744: mol_type = other DNA

SEQ ID NO: 25150 - DNA, 744 bp, synthetic construct; identical to SEQ ID NO: 1085
  source 1..744: mol_type = other DNA

SEQ ID NO: 25151 - DNA, 745 bp, synthetic construct; identical to SEQ ID NO: 1086
  source 1..745: mol_type = other DNA

SEQ ID NO: 25152 - DNA, 745 bp, synthetic construct; identical to SEQ ID NO: 1087
  source 1..745: mol_type = other DNA

SEQ ID NO: 25153 - DNA, 745 bp, synthetic construct; identical to SEQ ID NO: 1091
  source 1..745: mol_type = other DNA

SEQ ID NO: 25154 - DNA, 745 bp, synthetic construct; identical to SEQ ID NO: 1092
  source 1..745: mol_type = other DNA

SEQ ID NO: 25155 - DNA, 745 bp, synthetic construct; identical to SEQ ID NO: 1094
  source 1..745: mol_type = other DNA

SEQ ID NO: 25156 - DNA, 745 bp, synthetic construct; identical to SEQ ID NO: 1095
  source 1..745: mol_type = other DNA

SEQ ID NO: 25157 - DNA, 745 bp, synthetic construct; identical to SEQ ID NO: 1096
  source 1..745: mol_type = other DNA

SEQ ID NO: 25158 - DNA, 745 bp, synthetic construct; identical to SEQ ID NO: 1097
  source 1..745: mol_type = other DNA

SEQ ID NO: 25159 - DNA, 745 bp, synthetic construct; identical to SEQ ID NO: 1098
  source 1..745: mol_type = other DNA

SEQ ID NO: 25160 - DNA, 745 bp, synthetic construct; identical to SEQ ID NO: 1099
  source 1..745: mol_type = other DNA

SEQ ID NO: 25161 - DNA, 745 bp, synthetic construct; identical to SEQ ID NO: 1100
  source 1..745: mol_type = other DNA

SEQ ID NO: 25162 - DNA, 745 bp, synthetic construct; identical to SEQ ID NO: 1101
  source 1..745: mol_type = other DNA

SEQ ID NO: 25163 - DNA, 745 bp, synthetic construct; identical to SEQ ID NO: 1102
  source 1..745: mol_type = other DNA

SEQ ID NO: 25164 - DNA, 745 bp, synthetic construct; identical to SEQ ID NO: 1103
  source 1..745: mol_type = other DNA

SEQ ID NO: 25165 - DNA, 745 bp, synthetic construct; identical to SEQ ID NO: 1106
  source 1..745: mol_type = other DNA

SEQ ID NO: 25166 - DNA, 745 bp, synthetic construct; identical to SEQ ID NO: 1107
  source 1..745: mol_type = other DNA

SEQ ID NO: 25167 - DNA, 745 bp, synthetic construct; identical to SEQ ID NO: 1108
  source 1..745: mol_type = other DNA

SEQ ID NO: 25168 - DNA, 745 bp, synthetic construct; identical to SEQ ID NO: 1110
  source 1..745: mol_type = other DNA

SEQ ID NO: 25169 - DNA, 745 bp, synthetic construct; identical to SEQ ID NO: 1111
  source 1..745: mol_type = other DNA

SEQ ID NO: 25170 - DNA, 745 bp, synthetic construct; identical to SEQ ID NO: 1112
  source 1..745: mol_type = other DNA

SEQ ID NO: 25171 - DNA, 745 bp, synthetic construct; identical to SEQ ID NO: 1113
  source 1..745: mol_type = other DNA

SEQ ID NO: 25172 - DNA, 745 bp, synthetic construct; identical to SEQ ID NO: 1114
  source 1..745: mol_type = other DNA

SEQ ID NO: 25173 - DNA, 746 bp, synthetic construct; identical to SEQ ID NO: 1119
  source 1..746: mol_type = other DNA

SEQ ID NO: 25174 - DNA, 746 bp, synthetic construct; identical to SEQ ID NO: 1121
  source 1..746: mol_type = other DNA

SEQ ID NO: 25175 - DNA, 746 bp, synthetic construct; identical to SEQ ID NO: 1123
  source 1..746: mol_type = other DNA

SEQ ID NO: 25176 - DNA, 746 bp, synthetic construct; identical to SEQ ID NO: 1124
  source 1..746: mol_type = other DNA

SEQ ID NO: 25177 - DNA, 746 bp, synthetic construct; identical to SEQ ID NO: 1125
  source 1..746: mol_type = other DNA

SEQ ID NO: 25178 - DNA, 746 bp, synthetic construct; identical to SEQ ID NO: 1126
  source 1..746: mol_type = other DNA

SEQ ID NO: 25179 - DNA, 746 bp, synthetic construct; identical to SEQ ID NO: 1127
  source 1..746: mol_type = other DNA

SEQ ID NO: 25180 - DNA, 746 bp, synthetic construct; identical to SEQ ID NO: 1130
  source 1..746: mol_type = other DNA

SEQ ID NO: 25181 - DNA, 746 bp, synthetic construct; identical to SEQ ID NO: 1131
  source 1..746: mol_type = other DNA

SEQ ID NO: 25182 - DNA, 746 bp, synthetic construct; identical to SEQ ID NO: 1132
  source 1..746: mol_type = other DNA

SEQ ID NO: 25183 - DNA, 746 bp, synthetic construct; identical to SEQ ID NO: 1134
  source 1..746: mol_type = other DNA

SEQ ID NO: 25184 - DNA, 746 bp, synthetic construct; identical to SEQ ID NO: 1135
  source 1..746: mol_type = other DNA

SEQ ID NO: 25185 - DNA, 746 bp, synthetic construct; identical to SEQ ID NO: 1136
  source 1..746: mol_type = other DNA

SEQ ID NO: 25186 - DNA, 746 bp, synthetic construct; identical to SEQ ID NO: 1138
  source 1..746: mol_type = other DNA

SEQ ID NO: 25187 - DNA, 746 bp, synthetic construct; identical to SEQ ID NO: 1139
  source 1..746: mol_type = other DNA

SEQ ID NO: 25188 - DNA, 746 bp, synthetic construct; identical to SEQ ID NO: 1140
  source 1..746: mol_type = other DNA

SEQ ID NO: 25189 - DNA, 746 bp, synthetic construct; identical to SEQ ID NO: 1142
  source 1..746: mol_type = other DNA

SEQ ID NO: 25190 - DNA, 747 bp, synthetic construct; identical to SEQ ID NO: 1146
  source 1..747: mol_type = other DNA

SEQ ID NO: 25191 - DNA, 747 bp, synthetic construct; identical to SEQ ID NO: 1147
  source 1..747: mol_type = other DNA

SEQ ID NO: 25192 - DNA, 747 bp, synthetic construct; identical to SEQ ID NO: 1148
  source 1..747: mol_type = other DNA

SEQ ID NO: 25193 - DNA, 747 bp, synthetic construct; identical to SEQ ID NO: 1149
  source 1..747: mol_type = other DNA

SEQ ID NO: 25194 - DNA, 747 bp, synthetic construct; identical to SEQ ID NO: 1150
  source 1..747: mol_type = other DNA

SEQ ID NO: 25195 - DNA, 747 bp, synthetic construct; identical to SEQ ID NO: 1151
  source 1..747: mol_type = other DNA

SEQ ID NO: 25196 - DNA, 747 bp, synthetic construct; identical to SEQ ID NO: 1153
  source 1..747: mol_type = other DNA

SEQ ID NO: 25197 - DNA, 747 bp, synthetic construct; identical to SEQ ID NO: 1154
  source 1..747: mol_type = other DNA

SEQ ID NO: 25198 - DNA, 747 bp, synthetic construct; identical to SEQ ID NO: 1155
  source 1..747: mol_type = other DNA

SEQ ID NO: 25199 - DNA, 747 bp, synthetic construct; identical to SEQ ID NO: 1156
  source 1..747: mol_type = other DNA

SEQ ID NO: 25200 - DNA, 747 bp, synthetic construct; identical to SEQ ID NO: 1159
  source 1..747: mol_type = other DNA

SEQ ID NO: 25201 - DNA, 747 bp, synthetic construct; identical to SEQ ID NO: 1160
  source 1..747: mol_type = other DNA

SEQ ID NO: 25202 - DNA, 747 bp, synthetic construct; identical to SEQ ID NO: 1162
  source 1..747: mol_type = other DNA

SEQ ID NO: 25203 - DNA, 747 bp, synthetic construct; identical to SEQ ID NO: 1163
  source 1..747: mol_type = other DNA

SEQ ID NO: 25204 - DNA, 747 bp, synthetic construct; identical to SEQ ID NO: 1164
  source 1..747: mol_type = other DNA

SEQ ID NO: 25205 - DNA, 747 bp, synthetic construct; identical to SEQ ID NO: 1165
  source 1..747: mol_type = other DNA

SEQ ID NO: 25206 - DNA, 747 bp, synthetic construct; identical to SEQ ID NO: 1167
  source 1..747: mol_type = other DNA

SEQ ID NO: 25207 - DNA, 747 bp, synthetic construct; identical to SEQ ID NO: 1168
  source 1..747: mol_type = other DNA

SEQ ID NO: 25208 - DNA, 747 bp, synthetic construct; identical to SEQ ID NO: 1169
  source 1..747: mol_type = other DNA

SEQ ID NO: 25209 - DNA, 747 bp, synthetic construct; identical to SEQ ID NO: 1171
  source 1..747: mol_type = other DNA

SEQ ID NO: 25210 - DNA, 747 bp, synthetic construct; identical to SEQ ID NO: 1172
  source 1..747: mol_type = other DNA

SEQ ID NO: 25211 - DNA, 747 bp, synthetic construct; identical to SEQ ID NO: 1173
  source 1..747: mol_type = other DNA

SEQ ID NO: 25212 - DNA, 747 bp, synthetic construct; identical to SEQ ID NO: 1174
  source 1..747: mol_type = other DNA

SEQ ID NO: 25213 - DNA, 748 bp, synthetic construct; identical to SEQ ID NO: 1175
  source 1..748: mol_type = other DNA

SEQ ID NO: 25214 - DNA, 748 bp, synthetic construct; identical to SEQ ID NO: 1176
  source 1..748: mol_type = other DNA

SEQ ID NO: 25215 - DNA, 748 bp, synthetic construct; identical to SEQ ID NO: 1177
  source 1..748: mol_type = other DNA

SEQ ID NO: 25216 - DNA, 748 bp, synthetic construct; identical to SEQ ID NO: 1178
  source 1..748: mol_type = other DNA

SEQ ID NO: 25217 - DNA, 748 bp, synthetic construct; identical to SEQ ID NO: 1179
  source 1..748: mol_type = other DNA

SEQ ID NO: 25218 - DNA, 748 bp, synthetic construct; identical to SEQ ID NO: 1180
  source 1..748: mol_type = other DNA

SEQ ID NO: 25219 - DNA, 748 bp, synthetic construct; identical to SEQ ID NO: 1182
  source 1..748: mol_type = other DNA

SEQ ID NO: 25220 - DNA, 748 bp, synthetic construct; identical to SEQ ID NO: 1183
  source 1..748: mol_type = other DNA

SEQ ID NO: 25221 - DNA, 748 bp, synthetic construct; identical to SEQ ID NO: 1184
  source 1..748: mol_type = other DNA

SEQ ID NO: 25222 - DNA, 748 bp, synthetic construct; identical to SEQ ID NO: 1185
  source 1..748: mol_type = other DNA

SEQ ID NO: 25223 - DNA, 748 bp, synthetic construct; identical to SEQ ID NO: 1186
  source 1..748: mol_type = other DNA

SEQ ID NO: 25224 - DNA, 748 bp, synthetic construct; identical to SEQ ID NO: 1187
  source 1..748: mol_type = other DNA

SEQ ID NO: 25225 - DNA, 748 bp, synthetic construct; identical to SEQ ID NO: 1188
  source 1..748: mol_type = other DNA

SEQ ID NO: 25226 - DNA, 748 bp, synthetic construct; identical to SEQ ID NO: 1189
  source 1..748: mol_type = other DNA

SEQ ID NO: 25227 - DNA, 749 bp, synthetic construct; identical to SEQ ID NO: 1192
  source 1..749: mol_type = other DNA

SEQ ID NO: 25228 - DNA, 749 bp, synthetic construct; identical to SEQ ID NO: 1193
  source 1..749: mol_type = other DNA

SEQ ID NO: 25229 - DNA, 749 bp, synthetic construct; identical to SEQ ID NO: 1194
  source 1..749: mol_type = other DNA

SEQ ID NO: 25230 - DNA, 749 bp, synthetic construct; identical to SEQ ID NO: 1195
  source 1..749: mol_type = other DNA

SEQ ID NO: 25231 - DNA, 749 bp, synthetic construct; identical to SEQ ID NO: 1196
  source 1..749: mol_type = other DNA

SEQ ID NO: 25232 - DNA, 749 bp, synthetic construct; identical to SEQ ID NO: 1197
  source 1..749: mol_type = other DNA

SEQ ID NO: 25233 - DNA, 749 bp, synthetic construct; identical to SEQ ID NO: 1198
  source 1..749: mol_type = other DNA

SEQ ID NO: 25234 - DNA, 749 bp, synthetic construct; identical to SEQ ID NO: 1199
  source 1..749: mol_type = other DNA

SEQ ID NO: 25235 - DNA, 749 bp, synthetic construct; identical to SEQ ID NO: 1200
  source 1..749: mol_type = other DNA

SEQ ID NO: 25236 - DNA, 750 bp, synthetic construct; identical to SEQ ID NO: 1206
  source 1..750: mol_type = other DNA

SEQ ID NO: 25237 - DNA, 753 bp, synthetic construct; identical to SEQ ID NO: 1209
  source 1..753: mol_type = other DNA

SEQ ID NO: 25238 - DNA, 753 bp, synthetic construct; identical to SEQ ID NO: 1210
  source 1..753: mol_type = other DNA

SEQ ID NO: 25239 - DNA, 753 bp, synthetic construct; identical to SEQ ID NO: 1211
  source 1..753: mol_type = other DNA

SEQ ID NO: 25240 - DNA, 753 bp, synthetic construct; identical to SEQ ID NO: 1213
  source 1..753: mol_type = other DNA

SEQ ID NO: 25241 - DNA, 754 bp, synthetic construct; identical to SEQ ID NO: 1214
  source 1..754: mol_type = other DNA

SEQ ID NO: 25242 - DNA, 754 bp, synthetic construct; identical to SEQ ID NO: 1215
  source 1..754: mol_type = other DNA

SEQ ID NO: 25243 - DNA, 754 bp, synthetic construct; identical to SEQ ID NO: 1216
  source 1..754: mol_type = other DNA

SEQ ID NO: 25244 - DNA, 754 bp, synthetic construct; identical to SEQ ID NO: 1217
  source 1..754: mol_type = other DNA

SEQ ID NO: 25245 - DNA, 755 bp, synthetic construct; identical to SEQ ID NO: 1218
  source 1..755: mol_type = other DNA

SEQ ID NO: 25246 - DNA, 755 bp, synthetic construct; identical to SEQ ID NO: 1219
  source 1..755: mol_type = other DNA

SEQ ID NO: 25247 - DNA, 758 bp, synthetic construct; identical to SEQ ID NO: 1220
  source 1..758: mol_type = other DNA

SEQ ID NO: 25248 - DNA, 758 bp, synthetic construct; identical to SEQ ID NO: 1221
  source 1..758: mol_type = other DNA

SEQ ID NO: 25249 - DNA, 759 bp, synthetic construct; identical to SEQ ID NO: 1223
  source 1..759: mol_type = other DNA

SEQ ID NO: 25250 - DNA, 762 bp, synthetic construct; identical to SEQ ID NO: 1226
  source 1..762: mol_type = other DNA

SEQ ID NO: 25251 - DNA, 766 bp, synthetic construct; identical to SEQ ID NO: 1227
  source 1..766: mol_type = other DNA

SEQ ID NO: 25252 - DNA, 769 bp, synthetic construct; identical to SEQ ID NO: 1229
  source 1..769: mol_type = other DNA

SEQ ID NO: 25253 - DNA, 770 bp, synthetic construct; identical to SEQ ID NO: 1230
  source 1..770: mol_type = other DNA

SEQ ID NO: 25254 - DNA, 773 bp, synthetic construct; identical to SEQ ID NO: 1233
  source 1..773: mol_type = other DNA

SEQ ID NO: 25255 - DNA, 774 bp, synthetic construct; identical to SEQ ID NO: 1234
  source 1..774: mol_type = other DNA

SEQ ID NO: 25256 - DNA, 787 bp, synthetic construct; identical to SEQ ID NO: 1240
  source 1..787: mol_type = other DNA

SEQ ID NO: 25257 - DNA, 798 bp, synthetic construct; identical to SEQ ID NO: 1242
  source 1..798: mol_type = other DNA

SEQ ID NO: 25258 - DNA, 798 bp, synthetic construct; identical to SEQ ID NO: 1243
  source 1..798: mol_type = other DNA

SEQ ID NO: 25259 - DNA, 800 bp, synthetic construct; identical to SEQ ID NO: 1244
  source 1..800: mol_type = other DNA

SEQ ID NO: 25260 - DNA, 801 bp, synthetic construct; identical to SEQ ID NO: 1245
  source 1..801: mol_type = other DNA

SEQ ID NO: 25261 - DNA, 803 bp, synthetic construct; identical to SEQ ID NO: 1246
  source 1..803: mol_type = other DNA

SEQ ID NO: 25262 - DNA, 804 bp, synthetic construct; identical to SEQ ID NO: 1247
  source 1..804: mol_type = other DNA

SEQ ID NO: 25263 - DNA, 808 bp, synthetic construct; identical to SEQ ID NO: 1248
  source 1..808: mol_type = other DNA

SEQ ID NO: 25264 - DNA, 809 bp, synthetic construct; identical to SEQ ID NO: 1249
  source 1..809: mol_type = other DNA

SEQ ID NO: 25265 - DNA, 809 bp, synthetic construct; identical to SEQ ID NO: 1250
  source 1..809: mol_type = other DNA

SEQ ID NO: 25266 - DNA, 812 bp, synthetic construct; identical to SEQ ID NO: 1252
  source 1..812: mol_type = other DNA

SEQ ID NO: 25267 - DNA, 813 bp, synthetic construct; identical to SEQ ID NO: 1253
  source 1..813: mol_type = other DNA

SEQ ID NO: 25268 - DNA, 814 bp, synthetic construct; identical to SEQ ID NO: 1254
  source 1..814: mol_type = other DNA

SEQ ID NO: 25269 - DNA, 814 bp, synthetic construct; identical to SEQ ID NO: 1255
  source 1..814: mol_type = other DNA

SEQ ID NO: 25270 - DNA, 814 bp, synthetic construct; identical to SEQ ID NO: 1256
  source 1..814: mol_type = other DNA

SEQ ID NO: 25271 - DNA, 814 bp, synthetic construct; identical to SEQ ID NO: 1257
  source 1..814: mol_type = other DNA

SEQ ID NO: 25272 - DNA, 815 bp, synthetic construct; identical to SEQ ID NO: 1258
  source 1..815: mol_type = other DNA

SEQ ID NO: 25273 - DNA, 816 bp, synthetic construct; identical to SEQ ID NO: 1259
  source 1..816: mol_type = other DNA

SEQ ID NO: 25274 - DNA, 816 bp, synthetic construct; identical to SEQ ID NO: 1260
  source 1..816: mol_type = other DNA

SEQ ID NO: 25275 - DNA, 816 bp, synthetic construct; identical to SEQ ID NO: 1261
  source 1..816: mol_type = other DNA

SEQ ID NO: 25276 - DNA, 817 bp, synthetic construct; identical to SEQ ID NO: 1263
  source 1..817: mol_type = other DNA

SEQ ID NO: 25277 - DNA, 818 bp, synthetic construct; identical to SEQ ID NO: 1264
  source 1..818: mol_type = other DNA

SEQ ID NO: 25278 - DNA, 818 bp, synthetic construct; identical to SEQ ID NO: 1265
  source 1..818: mol_type = other DNA

SEQ ID NO: 25279 - DNA, 818 bp, synthetic construct; identical to SEQ ID NO: 1266
  source 1..818: mol_type = other DNA

SEQ ID NO: 25280 - DNA, 819 bp, synthetic construct; identical to SEQ ID NO: 1267
  source 1..819: mol_type = other DNA

SEQ ID NO: 25281 - DNA, 819 bp, synthetic construct; identical to SEQ ID NO: 1268
  source 1..819: mol_type = other DNA

SEQ ID NO: 25282 - DNA, 819 bp, synthetic construct; identical to SEQ ID NO: 1269
  source 1..819: mol_type = other DNA

SEQ ID NO: 25283 - DNA, 820 bp, synthetic construct; identical to SEQ ID NO: 1271
  source 1..820: mol_type = other DNA

SEQ ID NO: 25284 - DNA, 820 bp, synthetic construct; identical to SEQ ID NO: 1272
  source 1..820: mol_type = other DNA

SEQ ID NO: 25285 - DNA, 820 bp, synthetic construct; identical to SEQ ID NO: 1273
  source 1..820: mol_type = other DNA

SEQ ID NO: 25286 - DNA, 821 bp, synthetic construct; identical to SEQ ID NO: 1275
  source 1..821: mol_type = other DNA

SEQ ID NO: 25287 - DNA, 822 bp, synthetic construct; identical to SEQ ID NO: 1276
  source 1..822: mol_type = other DNA

SEQ ID NO: 25288 - DNA, 822 bp, synthetic construct; identical to SEQ ID NO: 1278
  source 1..822: mol_type = other DNA

SEQ ID NO: 25289 - DNA, 822 bp, synthetic construct; identical to SEQ ID NO: 1279
  source 1..822: mol_type = other DNA

SEQ ID NO: 25290 - DNA, 822 bp, synthetic construct; identical to SEQ ID NO: 1280
  source 1..822: mol_type = other DNA

SEQ ID NO: 25291 - DNA, 823 bp, synthetic construct; identical to SEQ ID NO: 1282
  source 1..823: mol_type = other DNA

SEQ ID NO: 25292 - DNA, 830 bp, synthetic construct; identical to SEQ ID NO: 1284
  source 1..830: mol_type = other DNA

SEQ ID NO: 25293 - DNA, 837 bp, synthetic construct; identical to SEQ ID NO: 1285
  source 1..837: mol_type = other DNA

SEQ ID NO: 25294 - DNA, 847 bp, synthetic construct; identical to SEQ ID NO: 1287
  source 1..847: mol_type = other DNA

SEQ ID NO: 25295 - DNA, 867 bp, synthetic construct; identical to SEQ ID NO: 1288
  source 1..867: mol_type = other DNA

SEQ ID NO: 25296 - DNA, 1000 bp, synthetic construct; identical to SEQ ID NO: 1460
  source 1..1000: mol_type = other DNA

SEQ ID NO: 25297 - DNA, 1000 bp, synthetic construct; identical to SEQ ID NO: 1463
  source 1..1000: mol_type = other DNA

SEQ ID NO: 25298 - DNA, 678 bp, synthetic construct; identical to SEQ ID NO: 2285
  source 1..678: mol_type = other DNA

SEQ ID NO: 25299 - DNA, 728 bp, synthetic construct; identical to SEQ ID NO: 2344
  source 1..728: mol_type = other DNA

SEQ ID NO: 25300 - DNA, 731 bp, synthetic construct; identical to SEQ ID NO: 2346
  source 1..731: mol_type = other DNA

SEQ ID NO: 25301 - DNA, 789 bp, synthetic construct; identical to SEQ ID NO: 2422
  source 1..789: mol_type = other DNA

SEQ ID NO: 25302 - DNA, 801 bp, synthetic construct; identical to SEQ ID NO: 2435
  source 1..801: mol_type = other DNA

SEQ ID NO: 25303 - DNA, 832 bp, synthetic construct; identical to SEQ ID NO: 2465
  source 1..832: mol_type = other DNA

SEQ ID NO: 25304 - DNA, 723 bp, synthetic construct; identical to SEQ ID NO: 1303
  source 1..723: mol_type = other DNA

SEQ ID NO: 25305 - DNA, 712 bp, synthetic construct; identical to SEQ ID NO: 1304
  source 1..712: mol_type = other DNA

SEQ ID NO: 25306 - DNA, 677 bp, synthetic construct; identical to SEQ ID NO: 1313
  source 1..677: mol_type = other DNA

SEQ ID NO: 25307 - DNA, 629 bp, synthetic construct; identical to SEQ ID NO: 1317
  source 1..629: mol_type = other DNA

SEQ ID NO: 25308 - DNA, 725 bp, synthetic construct; identical to SEQ ID NO: 1330
  source 1..725: mol_type = other DNA

SEQ ID NO: 25309 - DNA, 610 bp, synthetic construct; identical to SEQ ID NO: 665
  source 1..610: mol_type = other DNA

SEQ ID NO: 25310 - DNA, 711 bp, synthetic construct; identical to SEQ ID NO: 1342
  source 1..711: mol_type = other DNA

SEQ ID NO: 25311 - DNA, 713 bp, synthetic construct; identical to SEQ ID NO: 871
  source 1..713: mol_type = other DNA

SEQ ID NO: 25312 - DNA, 712 bp, synthetic construct; identical to SEQ ID NO: 867
  source 1..712: mol_type = other DNA

SEQ ID NO: 25313 - DNA, 711 bp, synthetic construct; identical to SEQ ID NO: 1346
  source 1..711: mol_type = other DNA

SEQ ID NO: 25314 - DNA, 646 bp, synthetic construct; identical to SEQ ID NO: 1347
  source 1..646: mol_type = other DNA

SEQ ID NO: 25315 - DNA, 601 bp, synthetic construct; identical to SEQ ID NO: 1353
  source 1..601: mol_type = other DNA

SEQ ID NO: 25316 - DNA, 601 bp, synthetic construct; identical to SEQ ID NO: 1354
  source 1..601: mol_type = other DNA

SEQ ID NO: 25317 - DNA, 612 bp, synthetic construct; identical to SEQ ID NO: 680
  source 1..612: mol_type = other DNA

SEQ ID NO: 25318 - DNA, 766 bp, synthetic construct; identical to SEQ ID NO: 1227
  source 1..766: mol_type = other DNA

SEQ ID NO: 25319 - DNA, 709 bp, synthetic construct; identical to SEQ ID NO: 1360
  source 1..709: mol_type = other DNA

SEQ ID NO: 25320 - DNA, 650 bp, synthetic construct; identical to SEQ ID NO: 1364
  source 1..650: mol_type = other DNA

SEQ ID NO: 25321 - DNA, 730 bp, synthetic construct; identical to SEQ ID NO: 1370
  source 1..730: mol_type = other DNA

SEQ ID NO: 25322 - DNA, 752 bp, synthetic construct; identical to SEQ ID NO: 128
  source 1..752: mol_type = other DNA

SEQ ID NO: 25323 - DNA, 653 bp, synthetic construct; identical to SEQ ID NO: 2987
  source 1..653: mol_type = other DNA

SEQ ID NO: 25324 - DNA, 661 bp, synthetic construct; identical to SEQ ID NO: 1406
  source 1..661: mol_type = other DNA

SEQ ID NO: 25325 - DNA, 625 bp, synthetic construct; identical to SEQ ID NO: 2985
  source 1..625: mol_type = other DNA

SEQ ID NO: 25326 - DNA, 630 bp, synthetic construct; identical to SEQ ID NO: 2986
  source 1..630: mol_type = other DNA

SEQ ID NO: 25327 - DNA, 665 bp, synthetic construct; identical to SEQ ID NO: 1432
  source 1..665: mol_type = other DNA

SEQ ID NO: 25328 - DNA, 787 bp, synthetic construct; identical to SEQ ID NO: 1438
  source 1..787: mol_type = other DNA

SEQ ID NO: 25329 - DNA, 770 bp, synthetic construct; identical to SEQ ID NO: 1230
  source 1..770: mol_type = other DNA

SEQ ID NO: 25330 - DNA, 545 bp, synthetic construct; identical to SEQ ID NO: 1440
  source 1..545: mol_type = other DNA

SEQ ID NO: 25331 - DNA, 782 bp, synthetic construct; identical to SEQ ID NO: 1441
  source 1..782: mol_type = other DNA

SEQ ID NO: 25332 - DNA, 1000 bp, synthetic construct; identical to SEQ ID NO: 138
  source 1..1000: mol_type = other DNA

SEQ ID NO: 25333 - DNA, 729 bp, synthetic construct; identical to SEQ ID NO: 922
  source 1..729: mol_type = other DNA

SEQ ID NO: 25334 - DNA, 755 bp, synthetic construct; identical to SEQ ID NO: 1218
  source 1..755: mol_type = other DNA

SEQ ID NO: 25335 - DNA, 744 bp, synthetic construct; identical to SEQ ID NO: 121
  source 1..744: mol_type = other DNA

SEQ ID NO: 25336 - DNA, 743 bp, synthetic construct; identical to SEQ ID NO: 119
  source 1..743: mol_type = other DNA

SEQ ID NO: 25337 - DNA, 746 bp, synthetic construct; identical to SEQ ID NO: 124
  source 1..746: mol_type = other DNA

SEQ ID NO: 25338 - DNA, 743 bp, synthetic construct; identical to SEQ ID NO: 120
  source 1..743: mol_type = other DNA

SEQ ID NO: 25339 - DNA, 1000 bp, synthetic construct; identical to SEQ ID NO: 138
  source 1..1000: mol_type = other DNA

SEQ ID NO: 25340 - DNA, 655 bp, synthetic construct; identical to SEQ ID NO: 793
  source 1..655: mol_type = other DNA

SEQ ID NO: 25341 - DNA, 730 bp, synthetic construct; identical to SEQ ID NO: 927
  source 1..730: mol_type = other DNA

SEQ ID NO: 25342 - DNA, 598 bp, synthetic construct; identical to SEQ ID NO: 648
  source 1..598: mol_type = other DNA

SEQ ID NO: 25343 - DNA, 664 bp, synthetic construct; identical to SEQ ID NO: 802
  source 1..664: mol_type = other DNA

SEQ ID NO: 25344 - DNA, 716 bp, synthetic construct; identical to SEQ ID NO: 889
  source 1..716: mol_type = other DNA

SEQ ID NO: 25345 - DNA, 747 bp, synthetic construct; identical to SEQ ID NO: 1174
  source 1..747: mol_type = other DNA

SEQ ID NO: 25346 - DNA, 744 bp, synthetic construct; identical to SEQ ID NO: 1061
  source 1..744: mol_type = other DNA

SEQ ID NO: 25347 - DNA, 745 bp, synthetic construct; identical to SEQ ID NO: 1112
  source 1..745: mol_type = other DNA

SEQ ID NO: 25348 - DNA, 742 bp, synthetic construct; identical to SEQ ID NO: 996
  source 1..742: mol_type = other DNA

SEQ ID NO: 25349 - DNA, 742 bp, synthetic construct; identical to SEQ ID NO: 1015
  source 1..742: mol_type = other DNA

SEQ ID NO: 25350 - DNA, 741 bp, synthetic construct; identical to SEQ ID NO: 983
  source 1..741: mol_type = other DNA

SEQ ID NO: 25351 - DNA, 742 bp, synthetic construct; identical to SEQ ID NO: 1002
  source 1..742: mol_type = other DNA

SEQ ID NO: 25352 - DNA, 742 bp, synthetic construct; identical to SEQ ID NO: 1018
  source 1..742: mol_type = other DNA

SEQ ID NO: 25353 - DNA, 743 bp, synthetic construct; identical to SEQ ID NO: 1045
  source 1..743: mol_type = other DNA

SEQ ID NO: 25354 - DNA, 743 bp, synthetic construct; identical to SEQ ID NO: 1038
  source 1..743: mol_type = other DNA

SEQ ID NO: 25355 - DNA, 742 bp, synthetic construct; identical to SEQ ID NO: 1004
  source 1..742: mol_type = other DNA

SEQ ID NO: 25356 - DNA, 743 bp, synthetic construct; identical to SEQ ID NO: 1058
  source 1..743: mol_type = other DNA

SEQ ID NO: 25357 - DNA, 744 bp, synthetic construct; identical to SEQ ID NO: 1081
  source 1..744: mol_type = other DNA

SEQ ID NO: 25358 - DNA, 743 bp, synthetic construct; identical to SEQ ID NO: 1036
  source 1..743: mol_type = other DNA

SEQ ID NO: 25359 - DNA, 742 bp, synthetic construct; identical to SEQ ID NO: 987
  source 1..742: mol_type = other DNA

SEQ ID NO: 25360 - DNA, 742 bp, synthetic construct; identical to SEQ ID NO: 1019
  source 1..742: mol_type = other DNA

SEQ ID NO: 25361 - DNA, 742 bp, synthetic construct; identical to SEQ ID NO: 1001
  source 1..742: mol_type = other DNA

SEQ ID NO: 25362 - DNA, 740 bp, synthetic construct; identical to SEQ ID NO: 967
  source 1..740: mol_type = other DNA

SEQ ID NO: 25363 - DNA, 741 bp, synthetic construct; identical to SEQ ID NO: 970
  source 1..741: mol_type = other DNA

SEQ ID NO: 25364 - DNA, 743 bp, synthetic construct; identical to SEQ ID NO: 1039
  source 1..743: mol_type = other DNA

SEQ ID NO: 25365 - DNA, 742 bp, synthetic construct; identical to SEQ ID NO: 989
  source 1..742: mol_type = other DNA

SEQ ID NO: 25366 - DNA, 733 bp, synthetic construct; identical to SEQ ID NO: 938
  source 1..733: mol_type = other DNA

SEQ ID NO: 25367 - DNA, 749 bp, synthetic construct; identical to SEQ ID NO: 1194
  source 1..749: mol_type = other DNA

SEQ ID NO: 25368 - DNA, 742 bp, synthetic construct; identical to SEQ ID NO: 1000
  source 1..742: mol_type = other DNA

SEQ ID NO: 25369 - DNA, 743 bp, synthetic construct; identical to SEQ ID NO: 1025
  source 1..743: mol_type = other DNA

SEQ ID NO: 25370 - DNA, 746 bp, synthetic construct; identical to SEQ ID NO: 1142
  source 1..746: mol_type = other DNA

SEQ ID NO: 25371 - DNA, 743 bp, synthetic construct; identical to SEQ ID NO: 1028
  source 1..743: mol_type = other DNA

SEQ ID NO: 25372 - DNA, 742 bp, synthetic construct; identical to SEQ ID NO: 1017
  source 1..742: mol_type = other DNA

SEQ ID NO: 25373 - DNA, 753 bp, synthetic construct; identical to SEQ ID NO: 1213
  source 1..753: mol_type = other DNA

SEQ ID NO: 25374 - DNA, 746 bp, synthetic construct; identical to SEQ ID NO: 1140
  source 1..746: mol_type = other DNA

SEQ ID NO: 25375 - DNA, 745 bp, synthetic construct; identical to SEQ ID NO: 1096
  source 1..745: mol_type = other DNA

SEQ ID NO: 25376 - DNA, 747 bp, synthetic construct; identical to SEQ ID NO: 1168
  source 1..747: mol_type = other DNA

SEQ ID NO: 25377 - DNA, 732 bp, synthetic construct; identical to SEQ ID NO: 934
  source 1..732: mol_type = other DNA

SEQ ID NO: 25378 - DNA, 749 bp, synthetic construct; identical to SEQ ID NO: 1198
  source 1..749: mol_type = other DNA

SEQ ID NO: 25379 - DNA, 747 bp, synthetic construct; identical to SEQ ID NO: 1154
  source 1..747: mol_type = other DNA

SEQ ID NO: 25380 - DNA, 749 bp, synthetic construct; identical to SEQ ID NO: 1200
  source 1..749: mol_type = other DNA

SEQ ID NO: 25381 - DNA, 747 bp, synthetic construct; identical to SEQ ID NO: 1155
  source 1..747: mol_type = other DNA

SEQ ID NO: 25382 - DNA, 748 bp, synthetic construct; identical to SEQ ID NO: 1180
  source 1..748: mol_type = other DNA

SEQ ID NO: 25383 - DNA, 746 bp, synthetic construct; identical to SEQ ID NO: 1138
  source 1..746: mol_type = other DNA

SEQ ID NO: 25384 - DNA, 746 bp, synthetic construct; identical to SEQ ID NO: 1136
  source 1..746: mol_type = other DNA

SEQ ID NO: 25385 - DNA, 744 bp, synthetic construct; identical to SEQ ID NO: 1067
  source 1..744: mol_type = other DNA

SEQ ID NO: 25386 - DNA, 750 bp, synthetic construct; identical to SEQ ID NO: 1206
  source 1..750: mol_type = other DNA

SEQ ID NO: 25387 - DNA, 746 bp, synthetic construct; identical to SEQ ID NO: 1131
  source 1..746: mol_type = other DNA

SEQ ID NO: 25388 - DNA, 747 bp, synthetic construct; identical to SEQ ID NO: 1162
  source 1..747: mol_type = other DNA

SEQ ID NO: 25389 - DNA, 714 bp, synthetic construct; identical to SEQ ID NO: 876
  source 1..714: mol_type = other DNA

SEQ ID NO: 25390 - DNA, 726 bp, synthetic construct; identical to SEQ ID NO: 917
  source 1..726: mol_type = other DNA

SEQ ID NO: 25391 - DNA, 749 bp, synthetic construct; identical to SEQ ID NO: 1199
  source 1..749: mol_type = other DNA

SEQ ID NO: 25392 - DNA, 747 bp, synthetic construct; identical to SEQ ID NO: 1172
  source 1..747: mol_type = other DNA

SEQ ID NO: 25393 - DNA, 734 bp, synthetic construct; identical to SEQ ID NO: 943
  source 1..734: mol_type = other DNA

SEQ ID NO: 25394 - DNA, 746 bp, synthetic construct; identical to SEQ ID NO: 1139
  source 1..746: mol_type = other DNA

SEQ ID NO: 25395 - DNA, 744 bp, synthetic construct; identical to SEQ ID NO: 1066
  source 1..744: mol_type = other DNA

SEQ ID NO: 25396 - DNA, 748 bp, synthetic construct; identical to SEQ ID NO: 1185
  source 1..748: mol_type = other DNA

SEQ ID NO: 25397 - DNA, 747 bp, synthetic construct; identical to SEQ ID NO: 1169
  source 1..747: mol_type = other DNA

SEQ ID NO: 25398 - DNA, 726 bp, synthetic construct; identical to SEQ ID NO: 918
  source 1..726: mol_type = other DNA

SEQ ID NO: 25399 - DNA, 712 bp, synthetic construct; identical to SEQ ID NO: 870
  source 1..712: mol_type = other DNA

SEQ ID NO: 25400 - DNA, 754 bp, synthetic construct; identical to SEQ ID NO: 1216
  source 1..754: mol_type = other DNA

SEQ ID NO: 25401 - DNA, 747 bp, synthetic construct; identical to SEQ ID NO: 1156
  source 1..747: mol_type = other DNA

SEQ ID NO: 25402 - DNA, 748 bp, synthetic construct; identical to SEQ ID NO: 1188
  source 1..748: mol_type = other DNA

SEQ ID NO: 25403 - DNA, 754 bp, synthetic construct; identical to SEQ ID NO: 1217
  source 1..754: mol_type = other DNA

SEQ ID NO: 25404 - DNA, 746 bp, synthetic construct; identical to SEQ ID NO: 1132
  source 1..746: mol_type = other DNA

SEQ ID NO: 25405 - DNA, 745 bp, synthetic construct; identical to SEQ ID NO: 1095
  source 1..745: mol_type = other DNA

SEQ ID NO: 25406 - DNA, 748 bp, synthetic construct; identical to SEQ ID NO: 1187
  source 1..748: mol_type = other DNA

SEQ ID NO: 25407 - DNA, 744 bp, synthetic construct; identical to SEQ ID NO: 1065
  source 1..744: mol_type = other DNA

SEQ ID NO: 25408 - DNA, 699 bp, synthetic construct; identical to SEQ ID NO: 842
  source 1..699: mol_type = other DNA

SEQ ID NO: 25409 - DNA, 745 bp, synthetic construct; identical to SEQ ID NO: 1101
  source 1..745: mol_type = other DNA

SEQ ID NO: 25410 - DNA, 749 bp, synthetic construct; identical to SEQ ID NO: 1196
  source 1..749: mol_type = other DNA

SEQ ID NO: 25411 - DNA, 749 bp, synthetic construct; identical to SEQ ID NO: 1197
  source 1..749: mol_type = other DNA

SEQ ID NO: 25412 - DNA, 743 bp, synthetic construct; identical to SEQ ID NO: 1035
  source 1..743: mol_type = other DNA

SEQ ID NO: 25413 - DNA, 747 bp, synthetic construct; identical to SEQ ID NO: 1163
  source 1..747: mol_type = other DNA

SEQ ID NO: 25414 - DNA, 738 bp, synthetic construct; identical to SEQ ID NO: 960
  source 1..738: mol_type = other DNA

SEQ ID NO: 25415 - DNA, 737 bp, synthetic construct; identical to SEQ ID NO: 957
  source 1..737: mol_type = other DNA

SEQ ID NO: 25416 - DNA, 744 bp, synthetic construct; identical to SEQ ID NO: 1078
  source 1..744: mol_type = other DNA

SEQ ID NO: 25417 - DNA, 742 bp, synthetic construct; identical to SEQ ID NO: 993
  source 1..742: mol_type = other DNA

SEQ ID NO: 25418 - DNA, 748 bp, synthetic construct; identical to SEQ ID NO: 1182
  source 1..748: mol_type = other DNA

SEQ ID NO: 25419 - DNA, 748 bp, synthetic construct; identical to SEQ ID NO: 1177
  source 1..748: mol_type = other DNA

SEQ ID NO: 25420 - DNA, 724 bp, synthetic construct; identical to SEQ ID NO: 907
  source 1..724: mol_type = other DNA

SEQ ID NO: 25421 - DNA, 748 bp, synthetic construct; identical to SEQ ID NO: 1186
  source 1..748: mol_type = other DNA

SEQ ID NO: 25422 - DNA, 747 bp, synthetic construct; identical to SEQ ID NO: 1164
  source 1..747: mol_type = other DNA

SEQ ID NO: 25423 - DNA, 748 bp, synthetic construct; identical to SEQ ID NO: 1183
  source 1..748: mol_type = other DNA

SEQ ID NO: 25424 - DNA, 746 bp, synthetic construct; identical to SEQ ID NO: 1130
  source 1..746: mol_type = other DNA

SEQ ID NO: 25425 - DNA, 712 bp, synthetic construct; identical to SEQ ID NO: 869
  source 1..712: mol_type = other DNA

SEQ ID NO: 25426 - DNA, 753 bp, synthetic construct; identical to SEQ ID NO: 1210
  source 1..753: mol_type = other DNA

SEQ ID NO: 25427 - DNA, 747 bp, synthetic construct; identical to SEQ ID NO: 1159
  source 1..747: mol_type = other DNA

SEQ ID NO: 25428 - DNA, 725 bp, synthetic construct; identical to SEQ ID NO: 914
  source 1..725: mol_type = other DNA

SEQ ID NO: 25429 - DNA, 742 bp, synthetic construct; identical to SEQ ID NO: 1023
  source 1..742: mol_type = other DNA

SEQ ID NO: 25430 - DNA, 735 bp, synthetic construct; identical to SEQ ID NO: 949
  source 1..735: mol_type = other DNA

SEQ ID NO: 25431 - DNA, 741 bp, synthetic construct; identical to SEQ ID NO: 980
  source 1..741: mol_type = other DNA

SEQ ID NO: 25432 - DNA, 742 bp, synthetic construct; identical to SEQ ID NO: 994
  source 1..742: mol_type = other DNA

SEQ ID NO: 25433 - DNA, 743 bp, synthetic construct; identical to SEQ ID NO: 1044
  source 1..743: mol_type = other DNA

SEQ ID NO: 25434 - DNA, 745 bp, synthetic construct; identical to SEQ ID NO: 1111
  source 1..745: mol_type = other DNA

SEQ ID NO: 25435 - DNA, 742 bp, synthetic construct; identical to SEQ ID NO: 995
  source 1..742: mol_type = other DNA

SEQ ID NO: 25436 - DNA, 715 bp, synthetic construct; identical to SEQ ID NO: 884
  source 1..715: mol_type = other DNA

SEQ ID NO: 25437 - DNA, 758 bp, synthetic construct; identical to SEQ ID NO: 1221
  source 1..758: mol_type = other DNA

SEQ ID NO: 25438 - DNA, 741 bp, synthetic construct; identical to SEQ ID NO: 984
  source 1..741: mol_type = other DNA

SEQ ID NO: 25439 - DNA, 742 bp, synthetic construct; identical to SEQ ID NO: 990
  source 1..742: mol_type = other DNA

SEQ ID NO: 25440 - DNA, 744 bp, synthetic construct; identical to SEQ ID NO: 1077
  source 1..744: mol_type = other DNA

SEQ ID NO: 25441 - DNA, 743 bp, synthetic construct; identical to SEQ ID NO: 1041
  source 1..743: mol_type = other DNA

SEQ ID NO: 25442 - DNA, 742 bp, synthetic construct; identical to SEQ ID NO: 992
  source 1..742: mol_type = other DNA

SEQ ID NO: 25443 - DNA, 719 bp, synthetic construct; identical to SEQ ID NO: 894
  source 1..719: mol_type = other DNA

SEQ ID NO: 25444 - DNA, 754 bp, synthetic construct; identical to SEQ ID NO: 1215
  source 1..754: mol_type = other DNA

SEQ ID NO: 25445 - DNA, 749 bp, synthetic construct; identical to SEQ ID NO: 1192
  source 1..749: mol_type = other DNA

SEQ ID NO: 25446 - DNA, 745 bp, synthetic construct; identical to SEQ ID NO: 1086
  source 1..745: mol_type = other DNA

SEQ ID NO: 25447 - DNA, 711 bp, synthetic construct; identical to SEQ ID NO: 862
  source 1..711: mol_type = other DNA

SEQ ID NO: 25448 - DNA, 689 bp, synthetic construct; identical to SEQ ID NO: 826
  source 1..689: mol_type = other DNA

SEQ ID NO: 25449 - DNA, 711 bp, synthetic construct; identical to SEQ ID NO: 863
  source 1..711: mol_type = other DNA

SEQ ID NO: 25450 - DNA, 711 bp, synthetic construct; identical to SEQ ID NO: 861
  source 1..711: mol_type = other DNA

SEQ ID NO: 25451 - DNA, 728 bp, synthetic construct; identical to SEQ ID NO: 921
  source 1..728: mol_type = other DNA

SEQ ID NO: 25452 - DNA, 707 bp, synthetic construct; identical to SEQ ID NO: 850
  source 1..707: mol_type = other DNA

SEQ ID NO: 25453 - DNA, 745 bp, synthetic construct; identical to SEQ ID NO: 1094
  source 1..745: mol_type = other DNA

SEQ ID NO: 25454 - DNA, 710 bp, synthetic construct; identical to SEQ ID NO: 857
  source 1..710: mol_type = other DNA

SEQ ID NO: 25455 - DNA, 744 bp, synthetic construct; identical to SEQ ID NO: 1068
  source 1..744: mol_type = other DNA

SEQ ID NO: 25456 - DNA, 686 bp, synthetic construct; identical to SEQ ID NO: 823
  source 1..686: mol_type = other DNA

SEQ ID NO: 25457 - DNA, 648 bp, synthetic construct; identical to SEQ ID NO: 783
  source 1..648: mol_type = other DNA

SEQ ID NO: 25458 - DNA, 814 bp, synthetic construct; identical to SEQ ID NO: 1255
  source 1..814: mol_type = other DNA

SEQ ID NO: 25459 - DNA, 809 bp, synthetic construct; identical to SEQ ID NO: 1249
  source 1..809: mol_type = other DNA

SEQ ID NO: 25460 - DNA, 813 bp, synthetic construct; identical to SEQ ID NO: 1253
  source 1..813: mol_type = other DNA

SEQ ID NO: 25461 - DNA, 801 bp, synthetic construct; identical to SEQ ID NO: 1245
  source 1..801: mol_type = other DNA

SEQ ID NO: 25462 - DNA, 798 bp, synthetic construct; identical to SEQ ID NO: 1242
  source 1..798: mol_type = other DNA

SEQ ID NO: 25463 - DNA, 798 bp, synthetic construct; identical to SEQ ID NO: 1243
  source 1..798: mol_type = other DNA

SEQ ID NO: 25464 - DNA, 814 bp, synthetic construct; identical to SEQ ID NO: 1256
  source 1..814: mol_type = other DNA

SEQ ID NO: 25465 - DNA, 804 bp, synthetic construct; identical to SEQ ID NO: 1247
  source 1..804: mol_type = other DNA

SEQ ID NO: 25466 - DNA, 745 bp, synthetic construct; identical to SEQ ID NO: 1098
  source 1..745: mol_type = other DNA

SEQ ID NO: 25467 - DNA, 745 bp, synthetic construct; identical to SEQ ID NO: 1114
  source 1..745: mol_type = other DNA

SEQ ID NO: 25468 - DNA, 743 bp, synthetic construct; identical to SEQ ID NO: 1033
  source 1..743: mol_type = other DNA

SEQ ID NO: 25469 - DNA, 821 bp, synthetic construct; identical to SEQ ID NO: 1275
  source 1..821: mol_type = other DNA

SEQ ID NO: 25470 - DNA, 823 bp, synthetic construct; identical to SEQ ID NO: 1282
  source 1..823: mol_type = other DNA

SEQ ID NO: 25471 - DNA, 822 bp, synthetic construct; identical to SEQ ID NO: 1278
  source 1..822: mol_type = other DNA

SEQ ID NO: 25472 - DNA, 820 bp, synthetic construct; identical to SEQ ID NO: 1271
  source 1..820: mol_type = other DNA

SEQ ID NO: 25473 - DNA, 822 bp, synthetic construct; identical to SEQ ID NO: 1280
  source 1..822: mol_type = other DNA

SEQ ID NO: 25474 - DNA, 817 bp, synthetic construct; identical to SEQ ID NO: 1263
  source 1..817: mol_type = other DNA

SEQ ID NO: 25475 - DNA, 822 bp, synthetic construct; identical to SEQ ID NO: 1279
  source 1..822: mol_type = other DNA

SEQ ID NO: 25476 - DNA, 837 bp, synthetic construct; identical to SEQ ID NO: 1285
  source 1..837: mol_type = other DNA

SEQ ID NO: 25477 - DNA, 814 bp, synthetic construct; identical to SEQ ID NO: 1257
  source 1..814: mol_type = other DNA

SEQ ID NO: 25478 - DNA, 816 bp, synthetic construct; identical to SEQ ID NO: 1260
  source 1..816: mol_type = other DNA

SEQ ID NO: 25479 - DNA, 816 bp, synthetic construct; identical to SEQ ID NO: 1261
  source 1..816: mol_type = other DNA

SEQ ID NO: 25480 - DNA, 818 bp, synthetic construct; identical to SEQ ID NO: 1264
  source 1..818: mol_type = other DNA

SEQ ID NO: 25481 - DNA, 819 bp, synthetic construct; identical to SEQ ID NO: 1267
  source 1..819: mol_type = other DNA

SEQ ID NO: 25482 - DNA, 819 bp, synthetic construct; identical to SEQ ID NO: 1269
  source 1..819: mol_type = other DNA

SEQ ID NO: 25483 - DNA, 820 bp, synthetic construct; identical to SEQ ID NO: 1272
  source 1..820: mol_type = other DNA

SEQ ID NO: 25484 - DNA, 809 bp, synthetic construct; identical to SEQ ID NO: 1250
  source 1..809: mol_type = other DNA

SEQ ID NO: 25485 - DNA, 816 bp, synthetic construct; identical to SEQ ID NO: 1259
  source 1..816: mol_type = other DNA

SEQ ID NO: 25486 - DNA, 773 bp, synthetic construct; identical to SEQ ID NO: 1233
  source 1..773: mol_type = other DNA

SEQ ID NO: 25487 - DNA, 819 bp, synthetic construct; identical to SEQ ID NO: 1268
  source 1..819: mol_type = other DNA

SEQ ID NO: 25488 - DNA, 818 bp, synthetic construct; identical to SEQ ID NO: 1265
  source 1..818: mol_type = other DNA

SEQ ID NO: 25489 - DNA, 812 bp, synthetic construct; identical to SEQ ID NO: 1252
  source 1..812: mol_type = other DNA

SEQ ID NO: 25490 - DNA, 820 bp, synthetic construct; identical to SEQ ID NO: 1273
  source 1..820: mol_type = other DNA

SEQ ID NO: 25491 - DNA, 818 bp, synthetic construct; identical to SEQ ID NO: 1266
  source 1..818: mol_type = other DNA

SEQ ID NO: 25492 - DNA, 1000 bp, synthetic construct; identical to SEQ ID NO: 1463
  source 1..1000: mol_type = other DNA

SEQ ID NO: 25493 - DNA, 832 bp, synthetic construct; identical to SEQ ID NO: 2465
  source 1..832: mol_type = other DNA

SEQ ID NO: 25494 - DNA, 678 bp, synthetic construct; identical to SEQ ID NO: 2285
  source 1..678: mol_type = other DNA

SEQ ID NO: 25495 - DNA, 728 bp, synthetic construct; identical to SEQ ID NO: 2344
  source 1..728: mol_type = other DNA

SEQ ID NO: 25496 - DNA, 744 bp, synthetic construct; identical to SEQ ID NO: 1069
  source 1..744: mol_type = other DNA

SEQ ID NO: 25497 - DNA, 747 bp, synthetic construct; identical to SEQ ID NO: 1160
  source 1..747: mol_type = other DNA

SEQ ID NO: 25498 - DNA, 747 bp, synthetic construct; identical to SEQ ID NO: 1165
  source 1..747: mol_type = other DNA

SEQ ID NO: 25499 - DNA, 847 bp, synthetic construct; identical to SEQ ID NO: 1287
  source 1..847: mol_type = other DNA

SEQ ID NO: 25500 - DNA, 745 bp, synthetic construct; identical to SEQ ID NO: 1103
  source 1..745: mol_type = other DNA

SEQ ID NO: 25501 - DNA, 683 bp, synthetic construct; identical to SEQ ID NO: 820
  source 1..683: mol_type = other DNA

SEQ ID NO: 25502 - DNA, 665 bp, synthetic construct; identical to SEQ ID NO: 1432
  source 1..665: mol_type = other DNA

SEQ ID NO: 25503 - DNA, 545 bp, synthetic construct; identical to SEQ ID NO: 1440
  source 1..545: mol_type = other DNA

SEQ ID NO: 25504 - DNA, 744 bp, synthetic construct; identical to SEQ ID NO: 1059
  source 1..744: mol_type = other DNA

SEQ ID NO: 25505 - DNA, 808 bp, synthetic construct; identical to SEQ ID NO: 1248
  source 1..808: mol_type = other DNA

SEQ ID NO: 25506 - DNA, 735 bp, synthetic construct; identical to SEQ ID NO: 948
  source 1..735: mol_type = other DNA

SEQ ID NO: 25507 - DNA, 729 bp, synthetic construct; identical to SEQ ID NO: 922
  source 1..729: mol_type = other DNA

SEQ ID NO: 25508 - DNA, 736 bp, synthetic construct; identical to SEQ ID NO: 951
  source 1..736: mol_type = other DNA

SEQ ID NO: 25509 - DNA, 735 bp, synthetic construct; identical to SEQ ID NO: 947
  source 1..735: mol_type = other DNA

SEQ ID NO: 25510 - DNA, 646 bp, synthetic construct; identical to SEQ ID NO: 1347
  source 1..646: mol_type = other DNA

SEQ ID NO: 25511 - DNA, 610 bp, synthetic construct; identical to SEQ ID NO: 665
  source 1..610: mol_type = other DNA

SEQ ID NO: 25512 - DNA, 737 bp, synthetic construct; identical to SEQ ID NO: 955
  source 1..737: mol_type = other DNA

SEQ ID NO: 25513 - DNA, 755 bp, synthetic construct; identical to SEQ ID NO: 1218
  source 1..755: mol_type = other DNA

SEQ ID NO: 25514 - DNA, 803 bp, synthetic construct; identical to SEQ ID NO: 1246
  source 1..803: mol_type = other DNA

SEQ ID NO: 25515 - DNA, 711 bp, synthetic construct; identical to SEQ ID NO: 1346
  source 1..711: mol_type = other DNA

SEQ ID NO: 25516 - DNA, 601 bp, synthetic construct; identical to SEQ ID NO: 1353
  source 1..601: mol_type = other DNA

SEQ ID NO: 25517 - DNA, 612 bp, synthetic construct; identical to SEQ ID NO: 680
  source 1..612: mol_type = other DNA

SEQ ID NO: 25518 - DNA, 711 bp, synthetic construct; identical to SEQ ID NO: 1342
  source 1..711: mol_type = other DNA

SEQ ID NO: 25519 - DNA, 713 bp, synthetic construct; identical to SEQ ID NO: 871
  source 1..713: mol_type = other DNA

SEQ ID NO: 25520 - DNA, 601 bp, synthetic construct; identical to SEQ ID NO: 1354
  source 1..601: mol_type = other DNA

SEQ ID NO: 25521 - DNA, 766 bp, synthetic construct; identical to SEQ ID NO: 1227
  source 1..766: mol_type = other DNA

SEQ ID NO: 25522 - DNA, 770 bp, synthetic construct; identical to SEQ ID NO: 1230
  source 1..770: mol_type = other DNA

SEQ ID NO: 25523 - DNA, 712 bp, synthetic construct; identical to SEQ ID NO: 1304
  source 1..712: mol_type = other DNA

SEQ ID NO: 25524 - DNA, 629 bp, synthetic construct; identical to SEQ ID NO: 1317
  source 1..629: mol_type = other DNA

SEQ ID NO: 25525 - DNA, 677 bp, synthetic construct; identical to SEQ ID NO: 1313
  source 1..677: mol_type = other DNA

SEQ ID NO: 25526 - DNA, 709 bp, synthetic construct; identical to SEQ ID NO: 1360
  source 1..709: mol_type = other DNA

SEQ ID NO: 25527 - DNA, 650 bp, synthetic construct; identical to SEQ ID NO: 1364
  source 1..650: mol_type = other DNA

SEQ ID NO: 25528 - DNA, 752 bp, synthetic construct; identical to SEQ ID NO: 128
  source 1..752: mol_type = other DNA

SEQ ID NO: 25529 - DNA, 730 bp, synthetic construct; identical to SEQ ID NO: 1370
  source 1..730: mol_type = other DNA

SEQ ID NO: 25530 - DNA, 801 bp, synthetic construct; identical to SEQ ID NO: 2435
  source 1..801: mol_type = other DNA

SEQ ID NO: 25531 - DNA, 716 bp, synthetic construct; identical to SEQ ID NO: 888
  source 1..716: mol_type = other DNA

SEQ ID NO: 25532 - DNA, 625 bp, synthetic construct; identical to SEQ ID NO: 743
  source 1..625: mol_type = other DNA

SEQ ID NO: 25533 - DNA, 625 bp, synthetic construct; identical to SEQ ID NO: 741
  source 1..625: mol_type = other DNA

SEQ ID NO: 25534 - DNA, 627 bp, synthetic construct; identical to SEQ ID NO: 752
  source 1..627: mol_type = other DNA

SEQ ID NO: 25535 - DNA, 596 bp, synthetic construct; identical to SEQ ID NO: 645
  source 1..596: mol_type = other DNA

SEQ ID NO: 25536 - DNA, 628 bp, synthetic construct; identical to SEQ ID NO: 753
  source 1..628: mol_type = other DNA

SEQ ID NO: 25537 - DNA, 700 bp, synthetic construct; identical to SEQ ID NO: 843
  source 1..700: mol_type = other DNA

SEQ ID NO: 25538 - DNA, 698 bp, synthetic construct; identical to SEQ ID NO: 839
  source 1..698: mol_type = other DNA

SEQ ID NO: 25539 - DNA, 741 bp, synthetic construct; identical to SEQ ID NO: 976
  source 1..741: mol_type = other DNA

SEQ ID NO: 25540 - DNA, 741 bp, synthetic construct; identical to SEQ ID NO: 975
  source 1..741: mol_type = other DNA

SEQ ID NO: 25541 - DNA, 737 bp, synthetic construct; identical to SEQ ID NO: 959
  source 1..737: mol_type = other DNA

SEQ ID NO: 25542 - DNA, 737 bp, synthetic construct; identical to SEQ ID NO: 958
  source 1..737: mol_type = other DNA

SEQ ID NO: 25543 - DNA, 725 bp, synthetic construct; identical to SEQ ID NO: 913
  source 1..725: mol_type = other DNA

SEQ ID NO: 25544 - DNA, 731 bp, synthetic construct; identical to SEQ ID NO: 932
  source 1..731: mol_type = other DNA

SEQ ID NO: 25545 - DNA, 654 bp, synthetic construct; identical to SEQ ID NO: 791
  source 1..654: mol_type = other DNA

SEQ ID NO: 25546 - DNA, 673 bp, synthetic construct; identical to SEQ ID NO: 816
  source 1..673: mol_type = other DNA

SEQ ID NO: 25547 - DNA, 625 bp, synthetic construct; identical to SEQ ID NO: 2985
  source 1..625: mol_type = other DNA

SEQ ID NO: 25548 - DNA, 630 bp, synthetic construct; identical to SEQ ID NO: 2986
  source 1..630: mol_type = other DNA

SEQ ID NO: 25549 - DNA, 653 bp, synthetic construct; identical to SEQ ID NO: 2987
  source 1..653: mol_type = other DNA

SEQ ID NO: 25550 - DNA, 625 bp, synthetic construct; identical to SEQ ID NO: 2985
  source 1..625: mol_type = other DNA

SEQ ID NO: 25551 - DNA, 630 bp, synthetic construct; identical to SEQ ID NO: 2986
  source 1..630: mol_type = other DNA

SEQ ID NO: 25552 - DNA, 653 bp, synthetic construct; identical to SEQ ID NO: 2987
  source 1..653: mol_type = other DNA

SEQ ID NO: 25553 - DNA, 625 bp, synthetic construct; identical to SEQ ID NO: 2985
  source 1..625: mol_type = other DNA

SEQ ID NO: 25554 - DNA, 630 bp, synthetic construct; identical to SEQ ID NO: 2986
  source 1..630: mol_type = other DNA

SEQ ID NO: 25555 - DNA, 653 bp, synthetic construct; identical to SEQ ID NO: 2987
  source 1..653: mol_type = other DNA

SEQ ID NO: 25556 - DNA, 625 bp, synthetic construct; identical to SEQ ID NO: 2985
  source 1..625: mol_type = other DNA

SEQ ID NO: 25557 - DNA, 630 bp, synthetic construct; identical to SEQ ID NO: 2986
  source 1..630: mol_type = other DNA

SEQ ID NO: 25558 - DNA, 653 bp, synthetic construct; identical to SEQ ID NO: 2987
  source 1..653: mol_type = other DNA

SEQ ID NO: 25559 - DNA, 625 bp, synthetic construct; identical to SEQ ID NO: 2985
  source 1..625: mol_type = other DNA

SEQ ID NO: 25560 - DNA, 630 bp, synthetic construct; identical to SEQ ID NO: 2986
  source 1..630: mol_type = other DNA

SEQ ID NO: 25561 - DNA, 653 bp, synthetic construct; identical to SEQ ID NO: 2987
  source 1..653: mol_type = other DNA

SEQ ID NO: 25562 - DNA, 625 bp, synthetic construct; identical to SEQ ID NO: 2985
  source 1..625: mol_type = other DNA

SEQ ID NO: 25563 - DNA, 630 bp, synthetic construct; identical to SEQ ID NO: 2986
  source 1..630: mol_type = other DNA

SEQ ID NO: 25564 - DNA, 653 bp, synthetic construct; identical to SEQ ID NO: 2987
  source 1..653: mol_type = other DNA

SEQ ID NO: 25565 - DNA, 625 bp, synthetic construct; identical to SEQ ID NO: 2985
  source 1..625: mol_type = other DNA

SEQ ID NO: 25566 - DNA, 630 bp, synthetic construct; identical to SEQ ID NO: 2986
  source 1..630: mol_type = other DNA

SEQ ID NO: 25567 - DNA, 653 bp, synthetic construct; identical to SEQ ID NO: 2987
  source 1..653: mol_type = other DNA

SEQ ID NO: 25568 - DNA, 625 bp, synthetic construct; identical to SEQ ID NO: 2985
  source 1..625: mol_type = other DNA

SEQ ID NO: 25569 - DNA, 630 bp, synthetic construct; identical to SEQ ID NO: 2986
  source 1..630: mol_type = other DNA

SEQ ID NO: 25570 - DNA, 653 bp, synthetic construct; identical to SEQ ID NO: 2987
  source 1..653: mol_type = other DNA

SEQ ID NO: 25571 - DNA, 222 bp, Azoarcus sp.
  source 1..222: mol_type = genomic DNA
gcggactcatatttcgatgtgccttgcgccgggaaaccacgcaagggatggtgtcaaattcggcgaaacctaagcgcccgcccgggcgtatggcaacgccgagccaagcttcggcgcctgcgccgatgaaggtgtagagactagacggcacccacctaaggcaaacgctatggtgaaggcatagtccagggagtggcgaaagtcacacaaaccggaatccgt

SEQ ID NO: 25572 - DNA, 266 bp, Anabaena sp.
  source 1..266: mol_type = genomic DNA
acggacttaaataattgagccttaaagaagaaattctttaagtggatgctctcaaactcagggaaacctaaatctagttatagacaaggcaatcctgagccaagccgaagtagtaattagtaagttaacaatagatgacttacaactaatcggaaggtgcagagactcgacgggagctaccctaacgtcaagacgagggtaaagagagagtccaattctcaaagccaataggcagtagcgaaagctgcaagagaatgaaaatccgt

SEQ ID NO: 25573 - DNA, 437 bp, Tetrahymena sp.
  source 1..437: mol_type = genomic DNA
taactatgactctctaaattgcaaaatttacctttggagggaaaagttatcaggcctgcacctgatagctagtctttaaaccaatagattgcatcggtttaataggcaagaccgtcaaattgcgggaaaagggtcaacagccgttcagtaccaagtctcaggggaaactttgagatggccttgcaaaggatatggtaataagctgacggacagggtcctaaccacgcagccaagtcctaagtcaacatttcggtgttgatatggatgcagttcacagactaaatgtcggtcggggaagaataggtattcttctcataagatatagtcggacctctccttaatgggagctggcggatgaagtggtgcaacactagagccgccgggaactaataataaacataatattagttttggactaatcgtaaggtagccaaatg

SEQ ID NO: 25574 - DNA, 290 bp, unidentified
  source 1..290: mol_type = unassigned DNA; note = Enterobacteria phage T4
gatgttttcttgggttaattgaggcctgagtataaggtgacttatacttgtaatctatctaaacggggaacctctctagtagacaatcccgtgctaaattgtaggactggttctacataaatgcctaacgactatccctttggggagtagggtcaagtgactcgaaacgatagacaacttgctttaacaagttggagatatagtctgctctgcatggtgacatgcagctggatataattccggggtaagattaacgaccttatctgaacataatgctaccgtttaatatt
